(19) United States
(12) Patent Application Publication
(10) Pub. No.: US 2013/0344048 A1
(43) Pub. Date: Dec. 26, 2013

(54) Method of reducing insulin resistance by administering a Hyaluronan-degrading enzyme

(71) Applicants: David H. Wasserman, Nashville, TN (US); Li Kang, Nashville, TN (US)

(72) Inventors: David H. Wasserman, Nashville, TN (US); Li Kang, Nashville, TN (US)

(21) Appl. No.: 13/507,376

(22) Filed: Jun. 21, 2012

(51) Int. Cl. A61K 38/47; A61P 3/04; A61P 3/06; A61P 15/00; A61P 9/10; A61P 9/00; A61P 9/12; A61P 3/08; A61P 3/10

(52) U.S. Cl. 424/94.3

(57) ABSTRACT

Provided herein are methods of reducing or ameliorating insulin resistant using a hyaluronan-degrading enzyme, and in particular a hyaluronan-degrading enzyme that is conjugated to a polymer. The methods also can be used to prevent or ameliorate diseases and conditions associated with insulin resistance, such as cardiovascular disease and type 2 diabetes.

### INCORPORATION BY REFERENCE OF SEQUENCE LISTING PROVIDED ON COMPACT DISCS

[0001] An electronic version on compact disc (CD-R) of the Sequence Listing is filed herewith in duplicate (labeled Copy #1 and Copy #2), the contents of which are incorporated by reference in their entirety. The computer-readable file on each of the aforementioned compact discs, created on Jun. 21, 2012, is identical, 876 kilobytes in size, and titled 3103SEQ.001.txt.

### FIELD OF THE INVENTION

[0002] Provided herein are methods of reducing or ameliorating insulin resistance using a hyaluronan-degrading enzyme, and in particular a hyaluronan-degrading enzyme that is conjugated to a polymer. The methods also can be used to prevent or ameliorate diseases and conditions associated with insulin resistance, such as cardiovascular disease and type 2 diabetes.

### BACKGROUND

[0003] Insulin resistance is a condition in which muscle, fat and liver cells do not properly respond to insulin, resulting in a reduced uptake of glucose by the cells. As a result, the pancreas compensates by producing more insulin. This can result in hyperinsulinemia and other conditions that eventually can result in cardiovascular disease or type 2 diabetes. There is an estimated 3-16% of the population that has diagnosed insulin resistance, with an increased rate of occurrence in overweight or obese individuals. Currently, the primary treatment for insulin resistance and diseases or conditions associated with insulin resistance is diet and exercise. However, compliance for behavioral interventions is low. Hence, there is a need for alternative treatments for insulin resistance and for diseases and conditions associated with insulin resistance, such as type 2 diabetes and cardiovascular disease.

### SUMMARY

[0004] Provided herein are methods in which a hyaluronan-degrading enzyme is administered to a subject to reduce or ameliorate insulin resistance. For example, provided herein are methods to reduce or ameliorate insulin resistance by administering a hyaluronan-degrading enzyme conjugated to a polymer to a subject that exhibits a symptom or symptoms of insulin resistance. The administered hyaluronan-degrading enzyme is administered in an amount sufficient to remove or degrade skeletal muscle-associated hyaluronan, resulting in a decrease or elimination of insulin resistance.

[0005] In any of the methods provided herein or combinations thereof, the hyaluronan-degrading enzyme can be administered a plurality of times. For example, the hyaluronan-degrading enzyme can be administered to the subject more than once and at a frequency of at least once a month. In some examples, the hyaluronan-degrading enzyme is administered at a frequency of at least twice a month, at least once a week, at least twice a week, at least three times a week, at least four times a week, at least five times a week, at least six times a week or at least seven times a week. In one example, the hyaluronan-degrading enzyme is administered at a frequency of at least twice a week.

[0006] In any of the methods provided herein or combinations thereof, the hyaluronan-degrading enzyme can be administered a plurality of times at a predetermined frequency. The frequency of administration can be for a predetermined time in a cycle of administration. For example, the predetermined time can be at least or is one week, two weeks, three weeks, four weeks, two months, three months, four months, five months, six months, seven months, eight months, nine months, 10 months, 11 months or 12 months. The cycle of administration can be repeated a plurality of times. For example, in one example, the hyaluronan-degrading enzyme is administered at least once a month (the frequency) for at least 12 months (the predetermined time). In such an example, the cycle of administration of administering the hyaluronan-degrading enzyme at least once a month for at least 12 months can be repeated a plurality of times. The particular combination of frequency and time of treatment can be determined by a skilled physician, and can be dependent on the extent of the insulin resistance, the particular patient and other factors.

[0007] For example, in any of the methods provided herein or combinations thereof, the hyaluronan-degrading enzyme can be administered until a symptom of insulin resistance is reduced. For example, the hyaluronan-degrading enzyme can be administered until a symptom of insulin resistance is reduced by at least or about at least 5%, 10%, 20%, 30%, 40%, 50%, 60%, 70%, 80% or more compared to the symptom prior to treatment.

[0008] In examples of any of the methods provided herein or combinations thereof of administering a hyaluronan-degrading enzyme to a subject that exhibits a symptom or symptoms of insulin resistance, the subject is obese. For example, the subject can have a body mass index (BMI) of greater than 32 kg/m², 33 kg/m², 34 kg/m², 35 kg/m², 40 kg/m², 45 kg/m² or greater, or the subject can have a BMI of between or about between 30 kg/m² to 50 kg/m²; 30 kg/m² to 40 kg/m²; 35 kg/m² to 50 kg/m²; 30 kg/m² to 35 kg/m²; or 35 kg/m² to 40 kg/m². In one example, the subject has a BMI of greater than 30 kg/m². In other examples, a hyaluronan-degrading enzyme is administered to a subject that exhibits hyperglycemia, dyslipidemia or hyperlipidemia and/or hyperinsulinemia.

[0009] In examples of any of the methods provided herein or combinations thereof of administering a hyaluronan-degrading enzyme to a subject that exhibits a symptom or symptoms of insulin resistance, the insulin resistance can be diagnosed, assessed or determined by standard assays known to one of skill in the art. For example, insulin resistance can be assessed by, for example, determining fasting insulin levels, a glucose tolerance test (GTT), a hyperinsulinemic euglycemic clamp, an insulin tolerance test (ITT), an insulin sensitivity test (IST), continuous infusion of glucose with model assessment (CIGMA), homeostatic model assessment (HOMA-IR), quantitative insulin sensitivity check index (QUICKI), McAuley's index, Matsuda index, Belfiore index, Cederholm index, Gutt index, Avignon index and Stumboll index.

[0010] For example, in examples of any of the methods provided herein or combinations thereof, insulin resistance is assessed in a subject based on the fasting insulin levels. For example, a subject exhibits insulin resistance when the subject's fasting insulin levels are greater than 10 Units/mL, 15 Units/mL, 20 Units/mL, 25 Units/mL, 30 Units/mL, 35 Units/mL, 40 Units/mL or higher. In other examples, insulin resistance in a subject is determined by a homeostasis model assessment (HOMA-IR). A subject exhibits insulin resistance when the HOMA-IR value is greater than 2.2, 2.3, 2.5, 2.6, 2.7, 2.8, 2.9, 3.0, 3.5, 4.0, 5.0, 6.0 or greater than 6.0. In yet other examples, insulin resistance in a subject is assessed by a hyperinsulinemic euglycemic clamp. A subject exhibits insulin resistance when the glucose disposal rate (GDR), as assessed by a hyperinsulinemic euglycemic clamp is less than 7.5 mg/kg per minute, less than 7.0 mg/kg per minute, less than 6.5 mg/kg per minute, less than 6.0 mg/kg per minute, less than 5.5 mg/kg per minute, less than 5.0 mg/kg per minute, less than 4.5 mg/kg per minute, less than 4.0 mg/kg per minute, less than 3.5 mg/kg per minute, less than 3.0 mg/kg per minute or lower. In another example, insulin resistance in a subject is determined by a quantitative insulin sensitivity check (QUICKI). A subject exhibits insulin resistance when the QUICKI value is less than 0.360, 0.359, 0.358, 0.357, 0.355, 0.350, 0.345, 0.340, 0.335, 0.330, 0.325, 0.320, 0.315, 0.310 or less than 0.310. In other examples, insulin resistance in a subject is determined by McAuley's index. A subject exhibits insulin resistance when the McAuley's index value is less than 6.0, 5.9, 5.8, 5.7, 5.6, 5.5, 5.0, 4.5, 4.0, 3.5, 3.0 or less than 3.0.

[0011] In any of the methods herein or combinations thereof of administering a hyaluronan-degrading enzyme to a subject to reduce or ameliorate insulin resistance, prior to administering the hyaluronan-degrading enzyme, a subject is selected that exhibits a symptom or symptoms of insulin resistance or that exhibits increased or accumulated hyaluronan (HA) levels. For example, the subject can be one that exhibits increased or accumulated skeletal muscle-associated hyaluronan. In any of the methods provided herein, the subject is selected by measuring the expression or level of a hyaluronan-associated marker in a sample from a subject and comparing the expression or level of the marker to the expression or level of the same marker in a control sample or standard. The hyaluronan-associated marker measured in the any of the methods provided herein can be, for example, hyaluronan (HA), a hyaluronidase, a hyaluronan synthase, interstitial fluid pressure, vascular volume and water content. In instances where the marker is a hyaluronan, the hyaluronan can be detected using, for example, an anti-HA antibody or an HA-binding protein. In some examples, the marker is a hyaluronan synthase, such as hyaluronan synthase 2 (HAS2). If the marker is changed compared to the control sample or standard, the subject is selected for treatment with the hyaluronan-degrading enzyme. In some examples the expression or level of the marker is elevated or increased compared to the control sample or standard. For example, the expression or level of the marker can be elevated or increased at least 0.5-fold, 1-fold, 2-fold, 2.5-fold, 3.0-fold, 4.0-fold, 5.0-fold or greater compared to the control sample or standard. In other examples, the expression or level of the marker is decreased compared to the control sample or standard. For example, the expression or level of the marker can be decreased at least 0.5-fold, 1-fold, 2-fold, 2.5-fold, 3.0-fold, 4.0-fold, 5.0-fold or greater compared to the control sample or standard.

[0012] In examples of any of the methods provided herein or combinations thereof that include selecting a subject by measuring the expression or level of a hyaluronan-associated marker in a sample in the subject, the sample obtained from the subject can be a fluid or tissue sample. For example, in examples where the sample is a fluid sample, it can be a blood (plasma), urine or saliva sample. In other examples of any of the methods provided herein, the sample can be a sample from skeletal muscle. In instances where the sample is a skeletal muscle sample, the sample can be obtained by biopsy from a muscle, such as from soleus, gastrocnemius and vastus lateralis. The control sample used for comparison to the sample obtained from the subject can be selected from among an analogous sample from another subject that is a normal subject or a subject known to express low hyaluronan in the sample, and a cell line.

[0013] In any of the methods provided herein or combination thereof of administering a hyaluronan-degrading enzyme to reduce insulin resistance, the subject can have a disease or condition associated with insulin resistance. The disease or condition associated with insulin resistance can be, for example, obesity, type 2 diabetes, hypertension, dyslipidemia, coronary artery disease, atherosclerosis and polycystic ovarian syndrome. Hence, in the methods provided herein, of reducing or ameliorating insulin resistance, the methods can prevent or ameliorate a disease or condition associated with insulin resistance.

[0014] In examples of any of the methods provided herein or combinations thereof, the hyaluronan-degrading enzyme is a hyaluronidase. The hyaluronidase can be, for example, a PH20 or truncated form thereof, such as a truncated form that lacks a C-terminal glycosylphosphatidylinositol (GPI) attachment site or a portion of the GPI attachment site. The PH20 can be a human or non-human PH20.

[0015] In any of the methods provided herein or combinations thereof, the hyaluronan-degrading enzyme is a C-terminal truncated PH20 that does not contain the full-length sequence of PH20, such as the full-length sequence set forth in SEQ ID NO:1 or a mature form thereof. The truncated PH20 can contain at least the sequence of amino acids 36-464 of SEQ ID NO:1, or can contain a sequence of amino acids that has at least 85% sequence identity to the sequence of amino acids that contains at least amino acids 36-464 of SEQ ID NO:1 and retains hyaluronidase activity. In examples where the hyaluronan-degrading enzyme is a truncated PH20, the amino acid sequence of the truncated PH20 has at least 86%, 87%, 88%, 89%, 90%, 91%, 92%, 93%, 94%, 95%, 96%, 97%, 98% or 99% sequence identity to a sequence of amino acids that contains at least amino acids 36-464 of SEQ ID NO:1 and retains hyaluronidase activity.

[0016] In examples of any of the methods provided herein, the PH20 has a sequence of amino acids that contains a C-terminal truncation of a full-length PH20 polypeptide. The C-terminal truncated PH20 polypeptides provided for use in the methods herein can be secreted from cells when expressed, are soluble and are neutral active. With respect to the full-length sequence of human PH20 set forth in SEQ ID NO:1, the C-terminal truncation can be after, for example, amino acid position 465, 466, 467, 468, 469, 470, 471, 472, 473, 474, 475, 476, 477, 478, 479, 480, 481, 482, 483, 484, 485, 486, 487, 488, 489, 490, 491, 492, 493, 494, 495, 496, 497, 498, 499 or 500 of the sequence of amino acids set forth in SEQ ID NO:1. Hence, the C-terminal truncated mutant can include a contiguous sequence of amino acids set forth in SEQ ID NO:1 (e.g. depending on the signal peptide or heterologous signal peptide used, beginning at amino acid 34, 35, 36, 37, 38, etc.) that has the sequence of amino acids with a C-terminal amino acid residue that is or is after 465, 466, 467, 468, 469, 470, 471, 472, 473, 474, 475, 476, 477, 478, 479, 480, 481, 482, 483, 484, 485, 486, 487, 488, 489, 490, 491, 492, 493, 494, 495, 496, 497, 498, 499 or 500 of the sequence of amino acids set forth in SEQ ID NO:1. or a variant thereof that exhibits at least 85% sequence identity to a sequence of amino acids that contains a C-terminal amino acid residue that is or is after amino acid position 465, 466, 467, 468, 469, 470, 471, 472, 473, 474, 475, 476, 477, 478, 479, 480, 481, 482, 483, 484, 485, 486, 487, 488, 489, 490, 491, 492, 493, 494, 495, 496, 497, 498, 499 or 500 of the sequence of amino acids set forth in SEQ ID NO:1 and retains hyaluronidase activity. For example, the PH20 can have an amino acid sequence that has at least 86%, 87%, 88%, 89%, 90%, 91%, 92%, 93%, 94%, 95%, 96%, 97%, 98% or 99% sequence identity to a sequence of amino acids that contains a C-terminal truncation after amino acid position 465, 466, 467, 468, 469, 470, 471, 472, 473, 474, 475, 476, 477, 478, 479, 480, 481, 482, 483, 484, 485, 486, 487, 488, 489, 490, 491, 492, 493, 494, 495, 496, 497, 498, 499 or 500 of the sequence of amino acids set forth in SEQ ID NO:1 and retains hyaluronidase activity.

[0017] In particular examples of any of the methods provided herein or combinations thereof, the hyaluronan-degrading enzyme that is conjugated to a polymer is a C-terminal truncated PH20 of the full-length sequence of human PH20 set forth in SEQ ID NO:1, and that is secreted when expressed from cells, soluble and/or neutral active. For example, the hyaluronan-degrading enzyme is a C-terminal truncated PH20 that has or consist of the sequence of amino acids set forth in any of SEQ ID NOS: 4-9, 47, 48, 150-170, 183-189, or a sequence of amino acids that is at least 85%, 86%, 87%, 88%, 89%, 90%, 91%, 92%, 93%, 94%, 95%, 96%, 97%, 98%, 99% or more sequence identity to any of SEQ ID NOS: 4-9, 47, 48, 150-170, 183-189.

[0018] In any of the methods provided herein or combinations thereof to reduce or ameliorate insulin resistance by administering a hyaluronan-degrading enzyme, the hyaluronan-degrading enzyme is conjugated to a polymer. The polymer can be, for example, a polyalkylene glycol, a dextran, a pullulan or a cellulose. In examples where the polymer is a polyalkylene glycol, the polyalkylene glycol is selected from among polyethylene glycols (PEG) or methoxypolyethylene glycols (mPEG). In examples where the polymer is a PEG, the PEG can be chosen from among a branched PEG or a linear PEG. In some examples, the polymer is produced by reaction with methoxy-poly(ethylene glycol)-succinimidyl butanoate (mPEG-SBA) (5 kDa); methoxy-poly(ethylene glycol)-succinimidyl butanoate (mPEG-SBA) (20 kDa); methoxy-poly(ethylene glycol)-succinimidyl butanoate (mPEG-SBA) (30 kDa); methoxy-poly(ethylene glycol)-succinimidyl α-methylbutanoate (mPEG-SMB) (20 kDa); methoxy-poly(ethylene glycol)-succinimidyl α-methylbutanoate (mPEG-SMB) (30 kDa); methoxy-poly(ethylene glycol)-butyraldehyde (mPEG-butyraldehyde) (30 kDa), methoxy-poly(ethylene glycol)-succinimidyl propionate (mPEG-SPA) (20 kDa); methoxy-poly(ethylene glycol)-succinimidyl propionate (mPEG-SPA) (30 kDa); (methoxy-poly(ethylene glycol))₂-N-hydroxysuccinimide ester (mPEG₂-NHS) (10 kDa branched); (methoxy-poly(ethylene glycol))₂-N-hydroxysuccinimide ester (mPEG₂-NHS) (20 kDa branched); (methoxy-poly(ethylene glycol))₂-N-hydroxysuccinimide ester (mPEG₂-NHS) (40 kDa branched); (methoxy-poly(ethylene glycol))₂-N-hydroxysuccinimide ester (mPEG₂-NHS) (60 kDa branched); biotin-poly(ethylene glycol)-N-hydroxysuccinimide ester (biotin-PEG-NHS) (5 kDa biotinylated); poly(ethylene glycol)-p-nitrophenyl carbonate (PEG-p-nitrophenyl-carbonate) (30 kDa); or poly(ethylene glycol)-priopionaldehyde (PEG-propionaldehyde) (30 kDa). In one example, the polymer is a PEG that has a molecular weight of 30 kilodaltons (kDa) or about 30 kDa.

[0019] In any of the methods provided herein or combinations thereof, the hyaluronan-degrading enzyme can be administered in a dosage range amount of between or about between 0.001 μg/kg to 25 mg/kg (of the subject), 0.01 μg/kg to 25 mg/kg, 0.5 μg/kg to 25 mg/kg, 0.5 μg/kg to 10 mg/kg, 0.5 μg/kg to 2.0 mg/kg, 0.02 μg/kg to 1.5 mg/kg, 0.01 μg/kg to 15 μg/kg, 0.05 μg/kg to 10 μg/kg, 0.75 μg/kg to 7.5 μg/kg, 1.0 μg/kg to 3.0 μg/kg or 0.1 μg/kg to 1 μg/kg. For example, the dosage range amount of the hyaluronan-degrading enzyme is between or about between 0.5 μg/kg to 2.0 mg/kg, 0.02 μg/kg to 1.5 mg/kg, 0.01 μg/kg to 15 μg/kg, 0.05 μg/kg to 10 μg/kg, 0.75 μg/kg to 7.5 μg/kg, 1.0 μg/kg to 3.0 μg/kg or 0.1 μg/kg to 1 μg/kg.

[0020] In other examples of any of the methods provided herein or combinations thereof, the hyaluronan-degrading enzyme is administered in a dosage range amount of between or about between 0.3 Unit/kg to 800,000 Units/kg (of the subject), 1 Unit/kg to 800,000 Units/kg, 10 to 800,000 Units/kg, 10 to 750,000 Units/kg, 10 to 700,000 Units/kg, 10 to 650,000 Units/kg, 10 to 600,000 Units/kg, 10 to 550,000 Units/kg, 10 to 500,000 Units/kg, 10 to 450,000 Units/kg, 10 to 400,000 Units/kg, 10 to 350,000 Units/kg, 10 to 320,000 Units/kg, 10 to 300,000 Units/kg, 10 to 280,000 Units/kg, 10 to 260,000 Units/kg, 10 to 240,000 Units/kg, 10 to 220,000 Units/kg, 10 to 200,000 Units/kg, 10 to 180,000 Units/kg, 10 to 160,000 Units/kg, 10 to 140,000 Units/kg, 10 to 120,000 Units/kg, 10 to 100,000 Units/kg, 10 to 80,000 Units/kg, 10 to 70,000 Units/kg, 10 to 60,000 Units/kg, 10 to 50,000 Units/kg, 10 to 40,000 Units/kg, 10 to 30,000 Units/kg, 10 to 20,000 Units/kg, 10 to 15,000 Units/kg, 10 to 12,800 Units/kg, 10 to 10,000 Units/kg, 10 to 9,000 Units/kg, 10 to 8,000 Units/kg, 10 to 7,000 Units/kg, 10 to 6,000 Units/kg, 10 to 5,000 Units/kg, 10 to 4,000 Units/kg, 10 to 3,000 Units/kg, 10 to 2,000 Units/kg, 10 to 1,000 Units/kg, 10 to 900 Units/kg, 10 to 800 Units/kg, 10 to 700 Units/kg, 10 to 500 Units/kg, 10 to 400 Units/kg, 10 to 300 Units/kg, 10 to 200 Units/kg, 10 to 100 Units/kg, 16 to 600,000 Units/kg, 16 to 500,000 Units/kg, 16 to 400,000 Units/kg, 16 to 350,000 Units/kg, 16 to 320,000 Units/kg, 16 to 160,000 Units/kg, 16 to 80,000 Units/kg, 16 to 40,000 Units/kg, 16 to 20,000 Units/kg, 16 to 16,000 Units/kg, 16 to 12,800 Units/kg, 16 to 10,000 Units/kg, 16 to 5,000 Units/kg, 16 to 4,000 Units/kg, 16 to 3,000 Units/kg, 16 to 2,000 Units/kg, 16 to 1,000 Units/kg, 16 to 900 Units/kg, 16 to 800 Units/kg, 16 to 700 Units/kg, 16 to 500 Units/kg, 16 to 400 Units/kg, 16 to 300 Units/kg, 16 to 200 Units/kg, 16 to 100 Units/kg, 160 to 12,800 Units/kg, 160 to 8,000 Units/kg, 160 to 6,000 Units/kg, 160 to 4,000 Units/kg, 160 to 2,000 Units/kg, 160 to 1,000 Units/kg, 160 to 500 Units/kg, 500 to 5000 Units/kg, 1000 to 100,000 Units/kg or 1000 to 10,000 Units/kg.

[0021] In any of the methods provided herein or combinations thereof, the hyaluronan-degrading enzyme can be administered orally, intravenously (IV), subcutaneously, intramuscularly, intra-tumorally, intradermally, topically, transdermally, rectally, intrathecally or sub-epidermally. In one example, the hyaluronan-degrading enzyme is administered intravenously, subcutaneously, or intramuscularly.

[0022] In some examples of any of the methods provided herein or combinations thereof, a corticosteroid is administered in addition to the hyaluronan-degrading enzyme. The corticosteroid can be, for example, a glucocorticoid. The glucocorticoid can be selected from among cortisones, dexamethasones, hydrocortisones, methylprednisolones, prednisolones and prednisones. In some examples, the corticosteroid is administered prior to, concurrent with, intermittently with, or subsequent to administration of the hyaluronan-degrading enzyme. In one example, the corticosteroid is administered with the hyaluronan-degrading enzyme. In another example, the corticosteroid is administered prior to the administration of the hyaluronan-degrading enzyme, for example, at least 1 hour prior to administration of the hyaluronan-degrading enzyme. In yet other examples, the corticosteroid is administered after administration of the hyaluronan-degrading enzyme, for example, at least 8 hours to 12 hours after administration of the hyaluronan-degrading enzyme.

[0023] In any of the examples provided herein in which a corticosteroid is administered in addition to the hyaluronan-degrading enzyme, the amount of corticosteroid administered is between or about between 0.1 to 20 mgs, 0.1 to 15 mgs, 0.1 to 10 mgs, 0.1 to 5 mgs, 0.2 to 20 mgs, 0.2 to 15 mgs, 0.2 to 10 mgs, 0.2 to 5 mgs, 0.4 to 20 mgs, 0.4 to 15 mgs, 0.4 to 10 mgs, 0.4 to 5 mgs, 0.4 to 4 mgs, 1 to 20 mgs, 1 to 15 mgs or 1 to 10 mgs. In the examples provided herein, the corticosteroid can be administered orally.

[0024] The any of the methods provided herein or combinations thereof of reducing or ameliorating insulin resistance, the hyaluronan-degrading enzyme can be administered in combination with another agent or another treatment for reducing or ameliorating insulin resistance. In some examples, the treatment is selected from among exercise or diet. In other examples, the agent or treatment is selected from among an insulin-sensitizing agent, for example, metformin, rosiglitazone, pioglitazone, troglitazone and D-chiro-inositol. In particular, in any of the examples provided herein, the additional agent or treatment is an agent or treatment for reducing or ameliorating a disease or condition associated with insulin resistance, for example, type 2 diabetes, cardiovascular disease or polycystic syndrome.

[0025] For example, in any of the examples provided herein, the subject that is treated has a disease or condition associated with insulin resistance that is type 2 diabetes, and a further agent or treatment of treating type 2 diabetes also is administered to the subject. The further treatment or agent can be selected from among a sulfonylurea, IGF-1, metformin, troglitazone, vandate or vanadium salts, phenyloin, sitagliptin, saxagliptin, repaglinide, nateglinide, Exenatide, liraglutide, and an insulin. In examples where the further treatment or agent is an insulin, the insulin can be, for example, a rapid-acting insulin analog or a super-fast-acting insulin composition. In some examples, the insulin is a rapid-acting insulin analog, and the rapid-acting insulin analog is selected from among insulin lispro, insulin aspart and insuline glulisine. In other examples, the insulin is a super-fast acting insulin composition, and the composition can contain a rapid-acting insulin analog and a hyaluronan-degrading enzyme.

[0026] In some examples of any of the methods provided herein, the subject that is treated has a disease or condition associated with insulin resistance that is a cardiovascular disease, and a further agent or treatment for treating cardiovascular disease is administered to the subject. The further treatment or agent can be a lipid-lowering drug or an anti-hypertensive agent. In examples where the further treatment or agent is a lipid-lowering drug, the lipid-lowering drug is selected from among a statin, a resin, a cholesterol absorption inhibitor, a fibrate or nicotinic acid. For example, the agent can be selected from among pravastatin, lovastatin, fluvastatin, simivastatin, rosuvastatin, L-Cholest, cholestyramine, colesevelam, colestipol, ezetimibe, simvastatin and ezetimibe combined, fenofibrate, bezabifrate, gemifibrozil and niacin. In examples where the agent is an anti-hypertensive agent, the agent is selected from among a renin inhibitor, an Angiotensin II receptor antagonist, an adrenergic receptor antagonist, a calcium channel blocker, a diuretic, an ACE inhibitor, an aldosterone antagonist, a vasodilators and an alpha-2 agonists. For example, the agent can be selected from among bumetanide, ethacrynic acid, furosemide, torsemide, epitizide, hydrochlorothiazide, chlorothiazide, bendroflumethiazide, indapamide, chlorthalidone, metolazone, amiloride, triamterene, spironolactone, atenolol, metoprolol, nadolol, oxprenolol, pindolol, propranolol, timolol, doxazosin, phentolamine, indoramin, phenoxybenzamine, prazosin, terazosin, tolazoline, bucindolol, carvedilol, labetalol, amlodipine, felodipine, isradipine, lercanidipine, nicardipine, nifedipine, nimodipine, nitrendipine, diltiazem, verapamil, captopril, enalapril, fosinopril, lisinopril, perindopril, quinapril, ramipril, trandolapril, benazepril, candesartan, eprosartan, irbesartan, losartan, olmesartan, telmisartan, valsartan, eplerenone, spironolactone, sodium nitroprusside, hydralazine, clonidine, guanabenz, methyldopa, moxonidine, guanethidine, and reserpine.

[0027] In some examples of any of the methods provided herein, the subject that is treated has a disease or condition associated with insulin resistance that is a polycystic ovary syndrome, and a further agent or treatment for treating polycystic ovary syndrome is administered to the subject. The further treatment or agent can be selected from among an ovulation medication, an anti-androgen, ovarian drilling surgery and in vitro fertilization (IVF).

[0028] In any of the methods provided herein above or combinations thereof, the subject used in the methods provided herein can be a human subject.

### DETAILED DESCRIPTION

### Outline

[0029] A. Definitions

[0030] B. Insulin Resistance and Hyaluronan

[0031] C. Hyaluronan-Degrading Enzymes and Polymer-Conjugated Hyaluronan-Degrading Enzymes
[0032] 1. Hyaluronidases
   [0033] b. Mammalian-type hyaluronidases
      [0034] PH20
   [0035] c. Bacterial Hyaluronidase
   [0036] d. Hyaluronidases from leeches, other parasites and crustaceans
[0037] 2. Other hyaluronan-degrading enzymes
[0038] 3. Soluble hyaluronan-degrading enzymes
   [0039] a. Soluble Human PH20
   [0040] b. rHuPH20
[0041] 4. Glycosylation of hyaluronan-degrading enzymes
[0042] 5. Modified (Polymer-Conjugated) Hyaluronan-degrading Enzymes PEGylated Soluble hyaluronan-degrading enzymes

[0043] D. Methods of Producing Nucleic Acids and Encoded Polypeptides of Hyaluronan-degrading Enzymes
[0044] 1. Vectors and Cells
[0045] 2. Expression
   [0046] a. Prokaryotic Cells
   [0047] b. Yeast Cells
   [0048] c. Insect Cells
   [0049] d. Mammalian cells
   [0050] e. Plants
[0051] 3. Purification Techniques
[0052] 4. PEGylation of Hyaluronan-degrading Enzyme Polypeptides

[0053] E. Pharmaceutical Compositions and Formulations
[0054] 1. Formulations
   [0055] a. Injectables, solutions and emulsions
   [0056] b. Lyophilized powders
   [0057] c. Topical administration
   [0058] d. Compositions for other routes of administration
[0059] 2. Formulation Amounts
[0060] 3. Packaging and Articles of Manufacture

[0061] F. Methods of Assessing Activity, Bioavailability and Pharmacokinetics
[0062] 1. In Vitro Assays
   [0063] a. Hyaluronidase Activity
   [0064] b. Insulin Action
[0065] 2. In Vivo Animal Models
[0066] 3. Ex vivo assays
[0067] 3. Pharmacokinetics, pharmacodynamics and tolerability

[0068] G. Methods of Treatment and Uses

[0069] H. Examples

### A. DEFINITIONS

[0070] Unless defined otherwise, all technical and scientific terms used herein have the same meaning as is commonly understood by one of skill in the art to which the invention(s) belong. All patents, patent applications, published applications and publications, Genbank sequences, databases, websites and other published materials referred to throughout the entire disclosure herein, unless noted otherwise, are incorporated by reference in their entirety. In the event that there is a plurality of definitions for terms herein, those in this section prevail. Where reference is made to a URL or other such identifier or address, it is understood that such identifiers can change and particular information on the internet can come and go, but equivalent information can be found by searching the internet. Reference thereto evidences the availability and public dissemination of such information.

[0071] As used herein, hyaluronan (HA or hyaluronic acid) refers to a glycosaminoglycan that is distributed throughout the connective, epithelial and neural tissues. It is a polymer of disaccharides, composed of D-glucuronic acid and D-N-acetylglucosamine, linked via alternating β-1,4 and β-1,3 glycosidic bonds, ranging in size from 5,000 to 20,000,000 Da. HA is a component of the extracellular matrix (ECM) and contributes to processes such as tissue hydrodynamics, movement and proliferation of cells and cell interactions through its primary receptors CD44 and RHAMM. HA is degraded by hyaluronan-degrading enzymes, such as hyaluronidases (e.g. PH20).

[0072] As used herein, “elevated” or “increased,” with reference to hyaluronan levels, refers to accumulated or higher amounts of hyaluronan in a particular tissue, body fluid or cell compared to other tissues, body fluids or cells. The reference levels on other tissues, body fluids or cells can be levels present in tissues, body fluids or cells of non-diseased or healthy or normal subjects. Hence, the elevated levels can be a consequence of, or otherwise observed in, various diseases or condition. For example, as shown herein, increased levels of hyaluronan in skeletal muscle is associated with insulin resistance.

[0073] As used herein, disease, disorder or condition are used interchangeably and refer to a pathological state in an organism or subject resulting from a physiologic defect or cause including, but not limited to, infections, acquired defects and genetic defects, and are characterized by identifiable symptoms. Diseases and conditions of interest herein are insulin resistance and diseases or conditions associated with insulin resistance.

[0074] As used herein, “insulin action” or “action of insulin” refers to the consequence of insulin binding to its plasma membrane receptor and effecting glucose uptake into muscle tissue and other tissues.

[0075] As used herein, “insulin resistance” refers to a condition characterized by a reduced response of cells to the action of insulin in transporting glucose from the bloodstream into muscle and other tissues, and an associated increased in the production of insulin by the pancreas, as compared to a normal population (i.e. a non-diabetic, non-obese population, generally having regular menstrual cycles for women, not suffering from hirsutism and having normal circulating androgen levels). Insulin resistance can lead to increased or elevated levels of insulin in the blood. In some cases, increased or elevated glucose levels also are present. Hence, insulin resistance is associated with hyperinsulinemia and can be associated with hyperglycemia. Insulin resistance is a component of or is associated with several disorders, including, but not limited to, type 2 diabetes; metabolic syndrome (Syndrome X); cardiovascular disease associated with hypertension, hyperlipidemia, or coronary artery disease; polycystic ovary syndrome; and ovarian hyperthecosis. Insulin resistance can be diagnosed or determined by various tests well-known to one of skill in the art and described herein, including but not limited to, fasting insulin levels, fasting glucose levels, hyperinsulinemic euglycemic clamp, homeostatic model assessment (HOMA), quantitative insulin sensitivity check index (QUICKI) and McAuley's index. The results of the test can be compared to a normal population or in a general population to determine the score, value or parameter indicative of subnormal insulin action in any of the available tests (see e.g. McAuley et al. (2001) Diabetes Care 24:460-464; Radikova (2003) Endocrine Regulations 37:189-194; Ascaso et al. (2003) Diabetes Care 26:3320-3325; Tam et al., Diabetes Care, published online Apr. 17, 2012 ahead of print). Generally, a level above the upper quartile in the fasting state in someone without diabetes is considered abnormal.

[0076] As used herein, a disease or condition associated with insulin resistance is any disease or condition in which insulin resistance is associated with the etiology, or is a cause, symptom or a factor in the disease or condition. Exemplary of diseases and conditions associated with insulin resistance include, but are not limited to, type 2 diabetes; metabolic syndrome (Syndrome X); cardiovascular disease associated with hypertension, hyperlipidemia, or coronary artery disease; polycystic ovary syndrome; and ovarian hyperthecosis.

[0077] As used herein, a symptom of insulin resistance refers to a sign or feature that is a characteristic of or that indicates that a subject is likely to exhibit insulin resistance and includes, but is not limited to, one or more features or characteristics selected from among fatigue, brain fogginess, intestinal bloating, sleepiness, increased triglycerides (e.g. dyslipidemia), increased blood pressure (hypertension), increased weight and fat storage and depression. In particular, symptoms of insulin resistance include hyperinsulinemia due to higher concentrations of insulin secreted by the pancreas. In some cases, low blood sugar (hypoglycemia) can be a feature of insulin resistance, particularly in pre-diabetic patients if their high circulating insulin levels are further challenged by a prolonged period of fasting. Insulin resistance also can be associated with hyperglycemia, in particular as the condition advances to type 2 diabetes. Obese persons typically have insulin resistance.

[0078] As used herein, hyperglycemia refers to a condition in which an excessive amount of glucose circulates in the blood. Signs and symptoms of hyperglycemia include, for example, high blood glucose, high levels of sugar in the urine, frequent urination and increased thirst. For example, a subject having a glucose level higher than 126 mg/dL or higher than 7 mmol/L exhibits hyperglycemia.

[0079] As used herein, hypoglycemia or low blood sugar refers to an abnormally diminished content of glucose in the blood.

[0080] As used herein, hyperinsulinemia refers to a condition in which there are excess levels of insulin circulating in the blood than expected relative to the level of glucose.

[0081] As used herein, blood pressure refers to a measure of the blood flow through the arteries measured in millimeters of mercury (mm Hg). Blood pressure includes the systolic pressure (the pressure when the heart is beating) and the diastolic pressure (the pressure when the heart is at rest). Blood pressure is generally depicted as the systolic pressure first and the diastolic pressure second.

[0082] As used herein, hypertension refers to high blood pressure. Blood pressure is high if it is greater than normal, which is defined as less than 120 over less than 80 (e.g. 120/80 mm Hg). Typically, pre-hypertension exists if blood pressure is between 120-139/80-89 mm Hg and hypertension exists if blood pressure is greater than or about or between 140-170 mm Hg/90-109 mm Hg, such as between or about between or greater than 140-159/90-99 mm Hg or 160-179/100-109 mm Hg.

[0083] As used herein, dyslipidemia refers to the presence of abnormal (e.g. high; hyperlipidemia) lipid levels, such as cholesterol and/or fat, in the blood. Dyslipidemia or hyperlipidemia is generally characterized by elevation of total cholesterol, the low-density lipoprotein (LDL) cholesterol and the triglyceride concentration. Generally, dyslipidemia is associated with decreased concentration of high-density lipoprotein (HDL) cholesterol in the blood.

[0084] As used herein, obesity refers to a condition characterized by an excess of body fat. Obesity can be measured based on body mass index (BMI), which is a measurement that considers weight and height. A person is generally considered to be overweight if their BMI is greater than 25 kg/m² (e.g. between 25 kg/m² to 30 kg/m²), and is severely obese with a BMI greater than 30 kg/m².

[0085] As used herein, reduction or amelioration of the symptoms of a particular disease or disorder by a treatment, such as by administration of a pharmaceutical composition or other therapeutic, refers to any lessening, whether permanent or temporary, lasting or transient, of the symptoms.

[0086] As used herein, reducing or ameliorating insulin resistance by an agent, such as a hyaluronan-degrading enzyme as provided herein, refers to a lessening, whether permanent or temporary, lasting or transient, of one or more symptoms of insulin resistance. For example, reducing or ameliorating insulin resistance can be evidenced by a decrease in weight, hypertension, triglyceride levels (dyslipidemia), hyperinsulinemia, or hyperglycemia. A symptom of insulin resistance is reduced if there is a decrease in the symptom by at least 5%, 10%, 15%, 20%, 30%, 40%, 50%, 60%, 70%, 80%, 90% or more compared to the level or extent of the symptom prior to the treatment or prior to the last administration of the treatment.

[0087] As used herein, prevention or prophylaxis refers to reduction in the risk of developing a disease or condition.

[0088] As used herein, the term “cardiovascular disease” is intended to include a range of symptoms, conditions, and/or diseases including atherosclerosis, coronary artery disease, pulmonary embolism, diabetic cardiomyopathy, angina pectoris, carotid artery disease, strokes, peripheral vascular disease, cerebral arteriosclerosis, myocardial infarction, high blood pressure, cerebral infarction, restenosis following balloon angioplasty, intermittent claudication, dyslipidemia post-prandial lipidemia and xanthoma, and all conventionally targeted symptoms arising from or associated with the foregoing diseases and conditions.

[0089] As used herein, type 2 diabetes (T2DM; also referred to as non-insulin-dependent diabetes mellitus (NIDDM) or adult-onset diabetes) refers to a metabolic disorder characterized by high blood glucose as a result of insulin resistance. The World Health Organization (WHO) characterizes diabetes, including T2DM, as fasting plasma glucose ≧7.0 mmol/L (126 mg/dL) or a 2 hour glucose tolerance test result after oral dose of a plasma glucose of ≧11.1 mmol/L (200 mg/dL). In addition, glycated hemoglobin (HbA_{1c}) also can be an indicator of diabetes, with measures of ≧6.5% HbA_{1c} indicative of diabetes.

[0090] As used herein, a hyaluronan-degrading enzyme refers to an enzyme that catalyzes the cleavage of a hyaluronan polymer (also referred to as hyaluronic acid or HA) into smaller molecular weight fragments. Exemplary of hyaluronan-degrading enzymes are hyaluronidases, and particular chondroitinases and lyases that have the ability to depolymerize hyaluronan. Exemplary chondroitinases that are hyaluronan-degrading enzymes include, but are not limited to, chondroitin ABC lyase (also known as chondroitinase ABC), chondroitin AC lyase (also known as chondroitin sulfate lyase or chondroitin sulfate eliminase) and chondroitin C lyase. Chondroitin ABC lyase includes two enzymes, chondroitin-sulfate-ABC endolyase (EC 4.2.2.20) and chondroitin-sulfate-ABC exolyase (EC 4.2.2.21). Exemplary chondroitin-sulfate-ABC endolyases and chondroitin-sulfate-ABC exolyases include, but are not limited to, those from Proteus vulgaris and Flavobacterium heparinum (the Proteus vulgaris chondroitin-sulfate-ABC endolyase is set forth in SEQ ID NO:98; Sato et al. (1994) Appl. Microbiol. Biotechnol. 41(1):39-46). Exemplary chondroitinase AC enzymes from the bacteria include, but are not limited to, those from Flavobacterium heparinum Victivallis vadensis, set forth in SEQ ID NO:99, and Arthrobacter aurescens (Tkalec et al. (2000) Appl. Environ. Microb. 66(1):29-35; Ernst et al. (1995) Crit. Rev. Biochem. Mol. Biol. 30(5):387-444). Exemplary chondroitinase C enzymes from the bacteria include, but are not limited to, those from Streptococcus and Flavobacterium (Hibi et al. (1989) FEMS-Microbiol-Lett. 48(2):121-4; Michelacci et al. (1976) J. Biol. Chem. 251:1154-8; Tsuda et al. (1999) Eur. J. Biochem. 262:127-133).

[0091] As used herein, hyaluronidase refers to a class of hyaluronan-degrading enzymes. Hyaluronidases include bacterial hyaluronidases (EC 4.2.2.1 or EC 4.2.99.1), hyaluronidases from leeches, other parasites, and crustaceans (EC 3.2.1.36), and mammalian-type hyaluronidases (EC 3.2.1.35). Hyaluronidases include any of non-human origin including, but not limited to, murine, canine, feline, leporine, avian, bovine, ovine, porcine, equine, piscine, ranine, bacterial, and any from leeches, other parasites, and crustaceans. Exemplary non-human hyaluronidases include, hyaluronidases from cows (SEQ ID NOS:10, 11, 64 and BH55 (U.S. Pat. Nos. 5,747,027 and 5,827,721)), yellow jacket wasp (SEQ ID NOS:12 and 13), honey bee (SEQ ID NO:14), white-face hornet (SEQ ID NO:15), paper wasp (SEQ ID NO:16), mouse (SEQ ID NOS:17-19, 32), pig (SEQ ID NOS:20-21), rat (SEQ ID NOS:22-24, 31), rabbit (SEQ ID NO:25), sheep (SEQ ID NOS:26, 27, 63 and 65), chimpanzee (SEQ ID NO:101), Rhesus monkey (SEQ ID NO:102), orangutan (SEQ ID NO:28), cynomolgus monkey (SEQ ID NO:29), guinea pig (SEQ ID NO:30), Arthrobacter sp. (strain FB24) (SEQ ID NO:67), Bdellovibrio bacteriovorus (SEQ ID NO:68), Propionibacterium acnes (SEQ ID NO:69), Streptococcus agalactiae ((SEQ ID NO:70); 18RS21 (SEQ ID NO:71); serotype 1a (SEQ ID NO:72); serotype III (SEQ ID NO:73)), Staphylococcus aureus (strain COL (SEQ ID NO:74); strain MRSA252 (SEQ ID NOS:75 and 76); strain MSSA476 (SEQ ID NO:77); strain NCTC 8325 (SEQ ID NO:78); strain bovine RF122 (SEQ ID NOS:79 and 80); strain USA300 (SEQ ID NO:81)), Streptococcus pneumoniae ((SEQ ID NO:82); strain ATCC BAA-255/R6 (SEQ ID NO:83); serotype 2, strain D39/NCTC 7466 (SEQ ID NO:84)), Streptococcus pyogenes (serotype M1 (SEQ ID NO:85); serotype M2, strain MGAS 10270 (SEQ ID NO:86); serotype M4, strain MGAS 10750 (SEQ ID NO:87); serotype M6 (SEQ ID NO:88); serotype M12, strain MGAS2096 (SEQ ID NOS:89 and 90); serotype M12, strain MGAS9429 (SEQ ID NO:91); serotype M28 (SEQ ID. NO:92)), Streptococcus suis (SEQ ID NOS:93-95), Vibrio fischeri (strain ATCC 700601/ES 114 (SEQ ID NO:96)), and the Streptomyces hyaluronolyticus hyaluronidase enzyme, which is specific for hyaluronic acid and does not cleave chondroitin or chondroitin sulfate (Ohya and Kaneko (1970) Biochim. Biophys. Acta 198:607). Hyaluronidases also include those of human origin. Exemplary human hyaluronidases include HYAL1 (SEQ ID NO:36), HYAL2 (SEQ ID NO:37), HYAL3 (SEQ ID NO:38), HYAL4 (SEQ ID NO:39), and PH20 (SEQ ID NO:1). Also included amongst hyaluronidases are soluble hyaluronidases, including ovine and bovine PH20, soluble human PH20 and soluble rHuPH20. Examples of commercially available bovine or ovine soluble hyaluronidases include Vitrase® (ovine hyaluronidase), Amphadase® (bovine hyaluronidase) and Hydase™ (bovine hyaluronidase).

[0092] As used herein, “purified bovine testicular hyaluronidase” refers to a bovine hyaluronidase purified from bovine testicular extracts (see U.S. Pat. Nos. 2,488,564; 2,488,565; 2,806,815; 2,808,362; 2,676,139; 2,795,529; 5,747,027; and 5,827,721). Examples of commercially available purified bovine testicular hyaluronidases include Amphadase® and Hydase™, and bovine hyaluronidases, including, but not limited to, those available from Sigma Aldrich, Abnova, EMD Chemicals, GenWay Biotech, Inc., Raybiotech, Inc., and Calzyme. Also included are recombinantly produced bovine hyaluronidases, such as but not limited to, those generated by expression of a nucleic acid molecule set forth in any of SEQ ID NOS:190-192.

[0093] As used herein, “purified ovine testicular hyaluronidase” refers to an ovine hyaluronidase purified from ovine testicular extracts (see U.S. Pat. Nos. 2,488,564; 2,488,565; and 2,806,815; and International PCT Application No. WO 2005/118799). Examples of commercially available purified ovine testicular extract include Vitrase®, and ovine hyaluronidases including, but not limited to, those available from Sigma Aldrich, Cell Sciences, EMD Chemicals, GenWay Biotech, Inc., Mybiosource.com and Raybiotech, Inc. Also included are recombinantly produced ovine hyaluronidases, such as, but not limited to, those generated by expression of a nucleic acid molecule set forth in any of SEQ ID NOS:66 and 193-194.

[0094] As used herein, “PH20” refers to a type of hyaluronidase that occurs in sperm and is neutral-active. PH20 occurs on the sperm surface, and in the lysosome-derived acrosome, where it is bound to the inner acrosomal membrane. PH20 includes those of any origin including, but not limited to, human, chimpanzee, cynomolgus monkey, rhesus monkey, murine, bovine, ovine, guinea pig, rabbit and rat origin. Exemplary PH20 polypeptides include those from human (SEQ ID NO:1), chimpanzee (SEQ ID NO:101), rhesus monkey (SEQ ID NO:102), cynomolgus monkey (SEQ ID NO:29), cow (e.g. SEQ ID NOS:11 and 64), mouse (SEQ ID NO:32), rat (SEQ ID NO:31), rabbit (SEQ ID NO:25), sheep (SEQ ID NOS:27, 63 and 65) and guinea pig (SEQ ID NO:30).

[0095] Reference to hyaluronan-degrading enzymes includes precursor hyaluronan-degrading enzyme polypeptides and mature hyaluronan-degrading enzyme polypeptides (such as those in which a signal sequence has been removed), truncated forms thereof that have activity, and includes allelic variants and species variants, variants encoded by splice variants, and other variants, including polypeptides that have at least 40%, 45%, 50%, 55%, 65%, 70%, 75%, 80%, 85%, 90%, 95%, 96%, 97%, 98%, 99% or more sequence identity to the precursor polypeptides set forth in SEQ ID NOS:1 and 10-48, 63-65, 67-102, or the mature forms thereof. For example, reference to hyaluronan-degrading enzyme also includes the human PH20 precursor polypeptide variants set forth in SEQ ID NOS:50-51. Hyaluronan-degrading enzymes also include those that contain chemical or posttranslational modifications and those that do not contain chemical or posttranslational modifications. Such modifications include, but are not limited to, PEGylation, albumination, glycosylation, farnesylation, carboxylation, hydroxylation, phosphorylation, and other polypeptide modifications known in the art. A truncated PH20 hyaluronidase is any C-terminal shortened form thereof, particularly forms that are truncated and neutral active when N-glycosylated.

[0096] As used herein, a “soluble PH20” refers to any form of PH20 that is soluble under physiologic conditions. A soluble PH20 can be identified, for example, by its partitioning into the aqueous phase of a Triton® X-114 solution at 37° C. (Bordier et al. (1981) J. Biol. Chem. 256:1604-1607). Membrane-anchored PH20, such as lipid-anchored PH20, including GPI-anchored PH20, will partition into the detergent-rich phase, but will partition into the detergent-poor or aqueous phase following treatment with Phospholipase-C. Included among soluble PH20 are membrane-anchored PH20 in which one or more regions associated with anchoring of the PH20 to the membrane have been removed or modified, where the soluble form retains hyaluronidase activity. Soluble PH20 also includes recombinant soluble PH20 and those contained in or purified from natural sources, such as, for example, testes extracts from sheep or cows. Exemplary of such soluble PH20 is soluble human PH20.

[0097] As used herein, soluble human PH20 or sHuPH20 includes PH20 polypeptides lacking all or a portion of the glycosylphosphatidylinositol (GPI) anchor sequence at the C-terminus such that upon expression, the polypeptides are soluble under physiological conditions. Solubility can be assessed by any suitable method that demonstrates solubility under physiologic conditions. Exemplary of such methods is the Triton® X-114 assay, that assesses partitioning into the aqueous phase and that is described above and in the examples. In addition, a soluble human PH20 polypeptide is, if produced in CHO cells, such as CHO-S cells, a polypeptide that is expressed and is secreted into the cell culture medium. Soluble human PH20 polypeptides, however, are not limited to those produced in CHO cells, but can be produced in any cell or by any method, including recombinant expression and polypeptide synthesis. Reference to secretion in CHO cells is definitional. Hence, if a polypeptide could be expressed and secreted in CHO cells and is soluble, i.e. partitions into the aqueous phase when extracted with Triton® X-114, it is a soluble PH20 polypeptide whether or not it is so-produced. The precursor polypeptides for sHuPH20 polypeptides can include a signal sequence, such as a heterologous or non-heterologous (i.e. native) signal sequence. Exemplary of the precursors are those that include a signal sequence, such as the native 35 amino acid signal sequence at amino acid positions 1-35 (see, e.g. amino acids 1-35 of SEQ ID NO:1).

[0098] As used herein, an “extended soluble PH20” or “esPH20” includes soluble PH20 polypeptides that contain residues up to the GPI anchor-attachment signal sequence and one or more contiguous residues from the GPI-anchor attachment signal sequence such that the esPH20 is soluble under physiological conditions. Solubility under physiological conditions can be determined by any method known to those of skill in the art. For example, it can be assessed by the Triton® X-114 assay described above and in the examples. In addition, as discussed above, a soluble PH20 is, if produced in CHO cells, such as CHO-S cells, a polypeptide that is expressed and is secreted into the cell culture medium. Soluble human PH20 polypeptides, however, are not limited to those produced in CHO cells, but can be produced in any cell or by any method, including recombinant expression and polypeptide synthesis. Reference to secretion in CHO cells is definitional. Hence, if a polypeptide could be expressed and secreted in CHO cells and is soluble, i.e. partitions into the aqueous phase when extracted with Triton® X-114, it is a soluble PH20 polypeptide whether or not it is so-produced. Human soluble esPH20 polypeptides include, in addition to residues 36-490, one or more contiguous amino acids from amino acid residue position 491 of SEQ ID NO:1, inclusive, such that the resulting polypeptide is soluble. Exemplary human esPH20 soluble polypeptides are those that have amino acids residues corresponding to amino acids 36-491, 36-492, 36-493, 36-494, 36-495, 36-496 and 36-497 of SEQ ID NO:1. Exemplary of these are those with an amino acid sequence set forth in any of SEQ ID NOS:151-154 and 185-187. Also included are allelic variants and other variants, such as any with 40%, 45%, 50%, 55%, 65%, 70%, 75%, 80%, 85%, 90%, 91%, 92%, 93%, 94%, 95%, 96%, 97%, 98%, 99% or greater sequence identity with the corresponding polypeptides of SEQ ID NOS:151-154 and 185-187 that retain neutral activity and are soluble. Reference to sequence identity refers to variants with amino acid substitutions.

[0099] As used herein, reference to “esPH20s” includes precursor esPH20 polypeptides and mature esPH20 polypeptides (such as those in which a signal sequence has been removed), truncated forms thereof that have enzymatic activity (retaining at least 1%, 10%, 20%, 30%, 40%, 50% or more of the full-length form) and are soluble, and includes allelic variants and species variants, variants encoded by splice variants, and other variants, including polypeptides that have at least 40%, 45%, 50%, 55%, 65%, 70%, 75%, 80%, 85%, 90%, 91%, 92%, 93%, 94%, 95%, 96%, 97%, 98%, 99% or more sequence identity to the precursor polypeptides set forth in SEQ ID NOS:1 and 3, or the mature forms thereof.

[0100] As used herein, reference to “esPH20s” also include those that contain chemical or posttranslational modifications and those that do not contain chemical or posttranslational modifications. Such modifications include, but are not limited to, PEGylation, albumination, glycosylation, farnesylation, carboxylation, hydroxylation, phosphorylation, and other polypeptide modifications known in the art.

[0101] As used herein, “soluble recombinant human PH20 (rHuPH20)” refers to a composition containing a soluble form of human PH20 as recombinantly expressed and secreted in Chinese Hamster Ovary (CHO) cells. Soluble rHuPH20 is encoded by a nucleic acid molecule that includes the signal sequence and is set forth in SEQ ID NO:49. The nucleic acid encoding soluble rHuPH20 is expressed in CHO cells which secrete the mature polypeptide. As produced in the culture medium, there is heterogeneity at the C-terminus so that the product includes a mixture of species that can include any one or more of SEQ ID NO:4 to SEQ ID NO:9 in various abundance.

[0102] Similarly, for other forms of PH20, such as the esPH20s, recombinantly expressed polypeptides and compositions thereof can include a plurality of species whose C-terminus exhibits heterogeneity. For example, compositions of recombinantly expressed esPH20 produced by expression of the polypeptide of SEQ ID NO:107, which encodes an esPH20 that has amino acids 36-497, can include forms with fewer amino acids, such as 36-496, 36-495.

[0103] As used herein, an “N-linked moiety” refers to an asparagine (N) amino acid residue of a polypeptide that is capable of being glycosylated by posttranslational modification of a polypeptide. Exemplary N-linked moieties of human PH20 include amino acids N82, N166, N235, N254, N368 and N393 of human PH20 set forth in SEQ ID NO:1.

[0104] As used herein, an “N-glycosylated polypeptide” refers to a PH20 polypeptide, or truncated form thereto, containing an oligosaccharide linkage of at least three N-linked amino acid residues, for example, N-linked moieties corresponding to amino acid residues N235, N368 and N393 of SEQ ID NO:1. An N-glycosylated polypeptide can include a polypeptide where three, four, five and up to all of the N-linked moieties are linked to an oligosaccharide. The N-linked oligosaccharides can include oligomannose, complex, hybrid or sulfated oligosaccharides, or other oligosaccharides and monosaccharides.

[0105] As used herein, an “N-partially glycosylated polypeptide” refers to a polypeptide that minimally contains an N-acetylglucosamine glycan linked to at least three N-linked moieties. A partially glycosylated polypeptide can include various glycan forms, including monosaccharides, oligosaccharides, and branched sugar forms, including those formed by treatment of a polypeptide with EndoH, EndoF1, EndoF2 and/or EndoF3.

[0106] As used herein, a “deglycosylated PH20 polypeptide” refers to a PH20 polypeptide in which fewer than all possible glycosylation sites are glycosylated. Deglycosylation can be affected, for example, by removing glycosylation, by preventing it, or by modifying the polypeptide to eliminate a glycosylation site. Particular N-glycosylation sites are not required for activity, whereas others are.

[0107] As used herein, a “conjugate” refers to a polypeptide linked directly or indirectly to one or more other polypeptides or chemical moieties. Such conjugates include fusion proteins, those produced by chemical conjugates and those produced by any other methods. For example, a conjugate refers to hyaluronan-degrading enzyme, such as a hyaluronidase or soluble PH20 polypeptide, linked directly or indirectly to one or more other polypeptides or chemical moieties, whereby at least one soluble PH20 polypeptide is linked, directly or indirectly to another polypeptide or chemical moiety, so long as the conjugate retains hyaluronidase activity.

[0108] As used herein, a “polymer” refers to any high molecular weight natural or synthetic moiety that is made up of repeating units. Polymers include, but are not limited to, polyethylene glycol moieities, dextran, cellulose and sialic acid. These and other exemplary polymers are described herein, and many are known in the art. For purposes herein, the polymer can be conjugated to, i.e. stably linked directly or indirectly via a linker, to a polypeptide. Such polymer conjugates typically increase serum half-life, and include, but are not limited to, sialic moieties, PEGylation moieties, dextran, and sugar and other moieties, such as for glycosylation. For example, hyaluronidases, such as a soluble PH20 or rHuPH20, can be conjugated to a polymer.

[0109] As used herein, “PEGylated” refers to covalent or other stable attachment of polymeric molecules, such as polyethylene glycol (PEGylation moiety PEG) to hyaluronan-degrading enzymes, such as hyaluronidases, typically to increase half-life of the hyaluronan-degrading enzyme.

[0110] As used herein, a “polymer-conjugated hyaluronan-degrading enzyme” refers to a hyaluronan-degrading enzyme that is linked directly or indirectly to a polymer. The linkage can be any type of linkage, including, but not limited to, ionic and covalent bonds, and any other sufficiently stable associated interaction. Reference to a polymer-conjugated hyaluronan-degrading enzyme means that the conjugate exhibits hyaluronidase activity. Typically, the polymer-conjugate exhibits at least 20%, 30%, 40%, 50%, 60%, 70%, 80%, 90% or more of the hyaluronidase activity compared to the hyaluronan-degrading enzyme that is not conjugated to a polymer.

[0111] As used herein, “activity” refers to a functional activity or activities of a polypeptide or portion thereof associated with a full-length (complete) protein. For example, active fragments of a polypeptide can exhibit an activity of a full-length protein. Functional activities include, but are not limited to, biological activity, catalytic or enzymatic activity, antigenicity (ability to bind or compete with a polypeptide for binding to an anti-polypeptide antibody), immunogenicity, ability to form multimers, and the ability to specifically bind to a receptor or ligand for the polypeptide.

[0112] As used herein, “hyaluronidase activity” refers to the ability to enzymatically catalyze the cleavage of hyaluronic acid. The United States Pharmacopeia (USP) XXII assay for hyaluronidase determines hyaluronidase activity indirectly by measuring the amount of higher molecular weight hyaluronic acid, or hyaluronan (HA), substrate remaining after the enzyme is allowed to react with the HA for 30 min at 37° C. (USP XXII-NF XVII (1990) 644-645 United States Pharmacopeia Convention, Inc, Rockville, Md.). A Reference Standard solution can be used in an assay to ascertain the relative activity, in units, of any hyaluronidase. In vitro assays to determine the hyaluronidase activity of hyaluronidases, such as PH20, including soluble PH20 and esPH20, are known in the art and described herein. Exemplary assays include the microturbidity assay that measures cleavage of hyaluronic acid by hyaluronidase indirectly by detecting the insoluble precipitate formed when the uncleaved hyaluronic acid binds with serum albumin and the biotinylated-hyaluronic acid assay that measures the cleavage of hyaluronic acid indirectly by detecting the remaining biotinylated-hyaluronic acid non-covalently bound to microtiter plate wells with a streptavidin-horseradish peroxidase conjugate and a chromogenic substrate. Reference Standards can be used, for example, to generate a standard curve to determine the activity in Units of the hyaluronidase being tested.

[0113] As used herein, specific activity refers to Units of activity per mg protein. The milligrams of hyaluronidase is defined by the absorption of a solution at 280 nm, assuming a molar extinction coefficient of approximately 1.7, in units of M⁻¹ cm⁻¹.

[0114] As used herein, “neutral active” refers to the ability of a PH20 polypeptide to enzymatically catalyze the cleavage of hyaluronic acid at neutral pH (e.g. at or about pH 7.0).

[0115] As used herein, a “GPI-anchor attachment signal sequence” is a C-terminal sequence of amino acids that directs addition of a preformed GPI-anchor to the polypeptide within the lumen of the ER. GPI-anchor attachment signal sequences are present in the precursor polypeptides of GPI-anchored polypeptides, such as GPI-anchored PH20 polypeptides. The C-terminal GPI-anchor attachment signal sequence typically contains a predominantly hydrophobic region of 8-20 amino acids, preceded by a hydrophilic spacer region of 8-12 amino acids, immediately downstream of the co-site, or site of GPI-anchor attachment. GPI-anchor attachment signal sequences can be identified using methods well known in the art. These include, but are not limited to, in silico methods and algorithms (see, e.g. Udenfriend et al. (1995) Methods Enzymol. 250:571-582; Eisenhaber et al. (1999) J. Biol. Chem. 292:741-758; Fankhauser et al. (2005) Bioinformatics 21:1846-1852; Omaetxebarria et al. (2007) Proteomics 7:1951-1960; and Pierleoni et al. (2008) BMC Bioinformatics 9:392), including those that are readily available on bioinformatic websites, such as the ExPASy Proteomics tools site (e.g. the WorldWideWeb site expasy.ch/tools/).

[0116] As used herein, “nucleic acids” include DNA, RNA and analogs thereof, including peptide nucleic acids (PNA) and mixtures thereof. Nucleic acids can be single- or double-stranded. When referring to probes or primers, which are optionally labeled, such as with a detectable label, such as a fluorescent or radiolabel, single-stranded molecules are contemplated. Such molecules are typically of a length such that their target is statistically unique or of low copy number (typically less than 5, generally less than 3) for probing or priming a library. Generally, a probe or primer contains at least 14, 16 or 30 contiguous nucleotides of sequence complementary to or identical to a gene of interest. Probes and primers can be 10, 20, 30, 50, 100 or more nucleic acids long.

[0117] As used herein, a peptide refers to a polypeptide that is greater than or equal to 2 amino acids in length, and less than or equal to 40 amino acids in length.

[0118] As used herein, the amino acids which occur in the various sequences of amino acids provided herein are identified according to their known, three-letter or one-letter abbreviations (Table 1). The nucleotides which occur in the various nucleic acid fragments are designated with the standard single-letter designations used routinely in the art.

[0119] As used herein, an “amino acid” is an organic compound containing an amino group and a carboxylic acid group. A polypeptide contains two or more amino acids. For purposes herein, amino acids include the twenty naturally-occurring amino acids, non-natural amino acids and amino acid analogs (i.e. amino acids wherein the α-carbon has a side chain).

[0120] As used herein, “amino acid residue” refers to an amino acid formed upon chemical digestion (hydrolysis) of a polypeptide at its peptide linkages. The amino acid residues described herein are presumed to be in the “L” isomeric form. Residues in the “D” isomeric form, which are so designated, can be substituted for any L-amino acid residue as long as the desired functional property is retained by the polypeptide. NH₂ refers to the free amino group present at the amino terminus of a polypeptide. COOH refers to the free carboxy group present at the carboxyl terminus of a polypeptide. In keeping with standard polypeptide nomenclature described in J. Biol. Chem. 243:3557-3559 (1968), and adopted in 37 C.F.R. §§1.821-1.822, abbreviations for amino acid residues are shown in Table 1:

TABLE 1
Table of Correspondence

| SYMBOL | | |
|---|---|---|
| 1-Letter | 3-Letter | AMINO ACID |
| Y | Tyr | Tyrosine |
| G | Gly | Glycine |
| F | Phe | Phenylalanine |
| M | Met | Methionine |
| A | Ala | Alanine |
| S | Ser | Serine |
| I | Ile | Isoleucine |
| L | Leu | Leucine |
| T | Thr | Threonine |
| V | Val | Valine |
| P | Pro | Proline |
| K | Lys | Lysine |
| H | His | Histidine |
| Q | Gln | Glutamine |
| E | Glu | Glutamic acid |
| Z | Glx | Glu and/or Gln |
| W | Trp | Tryptophan |
| R | Arg | Arginine |
| D | Asp | Aspartic acid |
| N | Asn | Asparagine |
| B | Asx | Asn and/or Asp |
| C | Cys | Cysteine |
| X | Xaa | Unknown or other |

[0121] All amino acid residue sequences represented herein by formulae have a left to right orientation in the conventional direction of amino-terminus to carboxyl-terminus. In addition, the phrase “amino acid residue” is defined to include the amino acids listed in the Table of Correspondence (Table 1) and modified and unusual amino acids, such as those referred to in 37 C.F.R. §§1.821-1.822, and incorporated herein by reference. Furthermore, it should be noted that a dash at the beginning or end of an amino acid residue sequence indicates a peptide bond to a further sequence of one or more amino acid residues, to an amino-terminal group such as NH₂ or to a carboxyl-terminal group such as COOH.

[0122] As used herein, the “naturally occurring α-amino acids” are the residues of those 20 α-amino acids found in nature which are incorporated into protein by the specific recognition of the charged tRNA molecule with its cognate mRNA codon in humans. Non-naturally occurring amino acids thus include, for example, amino acids or analogs of amino acids other than the 20 naturally-occurring amino acids and include, but are not limited to, the D-isostereomers of amino acids. Exemplary non-natural amino acids are described herein and are known to those of skill in the art.

[0123] As used herein, a DNA construct is a single- or double-stranded, linear or circular DNA molecule that contains segments of DNA combined and juxtaposed in a manner not found in nature. DNA constructs exist as a result of human manipulation, and include clones and other copies of manipulated molecules.

[0124] As used herein, a DNA segment is a portion of a larger DNA molecule having specified attributes. For example, a DNA segment encoding a specified polypeptide is a portion of a longer DNA molecule, such as a plasmid or plasmid fragment, which, when read from the 5′ to 3′ direction, encodes the sequence of amino acids of the specified polypeptide.

[0125] As used herein, the term polynucleotide means a single- or double-stranded polymer of deoxyribonucleotides or ribonucleotide bases read from the 5′ to the 3′ end. Polynucleotides include RNA and DNA, and can be isolated from natural sources, synthesized in vitro, or prepared from a combination of natural and synthetic molecules. The length of a polynucleotide molecule is given herein in terms of nucleotides (abbreviated “nt”) or base pairs (abbreviated “bp”). The term nucleotides is used for single- and double-stranded molecules where the context permits. When the term is applied to double-stranded molecules, it is used to denote overall length and will be understood to be equivalent to the term base pairs. It will be recognized by those skilled in the art that the two strands of a double-stranded polynucleotide can differ slightly in length and that the ends thereof can be staggered; thus, all nucleotides within a double-stranded polynucleotide molecule may not be paired. Such unpaired ends will, in general, not exceed 20 nucleotides in length.

[0126] As used herein, “similarity” between two proteins or nucleic acids refers to the relatedness between the sequence of amino acids of the proteins or the nucleotide sequences of the nucleic acids. Similarity can be based on the degree of identity and/or homology of sequences of residues and the residues contained therein. Methods for assessing the degree of similarity between proteins or nucleic acids are known to those of skill in the art. For example, in one method of assessing sequence similarity, two amino acid or nucleotide sequences are aligned in a manner that yields a maximal level of identity between the sequences. “Identity” refers to the extent to which the amino acid or nucleotide sequences are invariant. Alignment of amino acid sequences, and to some extent nucleotide sequences, also can take into account conservative differences and/or frequent substitutions in amino acids (or nucleotides). Conservative differences are those that preserve the physico-chemical properties of the residues involved. Alignments can be global (alignment of the compared sequences over the entire length of the sequences and including all residues) or local (alignment of a portion of the sequences that includes only the most similar region or regions).

[0127] “Identity” per se has an art-recognized meaning and can be calculated using published techniques. (See, e.g. Computational Molecular Biology, Lesk, A. M., ed., Oxford University Press, New York, 1988; Biocomputing: Informatics and Genome Projects, Smith, D. W., ed., Academic Press, New York, 1993; Computer Analysis of Sequence Data, Part I, Griffin, A. M., and Griffin, H. G., eds., Humana Press, New Jersey, 1994; Sequence Analysis in Molecular Biology, von Heinje, G., Academic Press, 1987; and Sequence Analysis Primer, Gribskov, M. and Devereux, J., eds., M Stockton Press, New York, 1991). While there exists a number of methods to measure identity between two polynucleotide or polypeptides, the term “identity” is well known to skilled artisans (Carillo and Lipton (1988) SIAM J. Appl. Math. 48:1073).

[0128] As used herein, “homologous” (with respect to nucleic acid and/or amino acid sequences) means about greater than or equal to 25% sequence homology, typically greater than or equal to 25%, 40%, 50%, 60%, 70%, 80%, 85%, 90% or 95% sequence homology; the precise percentage can be specified if necessary. For purposes herein, the terms “homology” and “identity” are often used interchangeably, unless otherwise indicated. In general, for determination of the percentage homology or identity, sequences are aligned so that the highest order match is obtained (see, e.g. Computational Molecular Biology, Lesk, A. M., ed., Oxford University Press, New York, 1988; Biocomputing: Informatics and Genome Projects, Smith, D. W., ed., Academic Press, New York, 1993; Computer Analysis of Sequence Data, Part I, Griffin, A. M., and Griffin, H. G., eds., Humana Press, New Jersey, 1994; Sequence Analysis in Molecular Biology, von Heinje. G., Academic Press, 1987; and Sequence Analysis Primer, Gribskov, M. and Devereux, J., eds., M Stockton Press, New York, 1991; Carillo and Lipton (1988) SIAM J. Appl. Math. 48:1073). By sequence homology, the number of conserved amino acids is determined by standard alignment algorithm programs, and can be used with default gap penalties established by each supplier. Substantially homologous nucleic acid molecules would hybridize typically at moderate stringency or at high stringency all along the length of the nucleic acid of interest. Also contemplated are nucleic acid molecules that contain degenerate codons in place of codons in the hybridizing nucleic acid molecule.

[0129] Whether any two molecules have nucleotide sequences or amino acid sequences that are at least 60%, 70%, 80%, 85%, 90%, 95%, 96%, 97%, 98% or 99% “identical” or “homologous” can be determined using known computer algorithms such as the “FASTA” program, using for example, the default parameters as in Pearson et al. (1988) Proc. Natl. Acad. Sci. U.S.A. 85:2444 (other programs include the GCG program package (Devereux et al. (1984) Nucleic Acids Res. 12(1):387), BLASTP, BLASTN, FASTA (Altschul et al. (1990) J. Mol. Biol. 215:403-410; Guide to Huge Computers, Martin J. Bishop, ed., Academic Press, San Diego, 1994; and Carillo and Lipton (1988) SIAM. J. Appl. Math. 48:1073). For example, the BLAST function of the National Center for Biotechnology Information database can be used to determine identity. Other commercially or publicly available programs include DNAStar “MegAlign” program (Madison, Wis.) and the University of Wisconsin Genetics Computer Group (UWG) “Gap” program (Madison Wis.). Percent homology or identity of proteins and/or nucleic acid molecules can be determined, for example, by comparing sequence information using a GAP computer program (e.g. Needleman et al. (1970) J. Mol. Biol. 48:443, as revised by Smith and Waterman (Adv. Appl. Math. 2:482 (1981)). Briefly, the GAP program defines similarity as the number of aligned symbols (i.e. nucleotides or amino acids) which are similar, divided by the total number of symbols in the shorter of the two sequences. Default parameters for the GAP program can include: (1) a unary comparison matrix (containing a value of 1 for identities and 0 for non-identities) and the weighted comparison matrix of Gribskov et al. (1986) Nucleic Acids Res. 14:6745, as described by Schwartz and Dayhoff, eds., in “Atlas of Protein Sequence and Structure,” National Biomedical Research Foundation, pp. 353-358 (1979); (2) a penalty of 3.0 for each gap and an additional 0.10 penalty for each symbol in each gap; and (3) no penalty for end gaps.

[0130] Therefore, as used herein, the term “identity” or “homology” represents a comparison between a test and a reference polypeptide or polynucleotide. As used herein, the term at least “90% identical to” refers to percent identities from 90 to 99.99 relative to the reference nucleic acid or amino acid sequence of the polypeptide. Identity at a level of 90% or more is indicative of the fact that, assuming for exemplification purposes, a test and reference polypeptide length of 100 amino acids are compared. No more than 10% (i.e. 10 out of 100) of the amino acids in the test polypeptide differ from that of the reference polypeptide. Similar comparisons can be made between test and reference polynucleotides. Such differences can be represented as point mutations randomly distributed over the entire length of a polypeptide or they can be clustered in one or more locations of varying length up to the maximum allowable, e.g. 10/100 amino acid difference (approximately 90% identity). Differences are defined as nucleic acid or amino acid substitutions, insertions or deletions. At the level of homologies or identities above about 85-90%, the result should be independent of the program and gap parameters set; such high levels of identity can be assessed readily, often by manual alignment without relying on software.

[0131] As used herein, an aligned sequence refers to the use of homology (similarity and/or identity) to align corresponding positions in a sequence of nucleotides or amino acids. Typically, two or more sequences that are related by 50% or more identity are aligned. An aligned set of sequences refers to 2 or more sequences that are aligned at corresponding positions and can include aligning sequences derived from RNAs, such as ESTs and other cDNAs, aligned with genomic DNA sequence.

[0132] As used herein, “primer” refers to a nucleic acid molecule that can act as a point of initiation of template-directed DNA synthesis under appropriate conditions (e.g. in the presence of four different nucleoside triphosphates and a polymerization agent, such as DNA polymerase, RNA polymerase or reverse transcriptase) in an appropriate buffer and at a suitable temperature. It will be appreciated that certain nucleic acid molecules can serve as a “probe” and as a “primer.” A primer, however, has a 3′ hydroxyl group for extension. A primer can be used in a variety of methods, including, for example, polymerase chain reaction (PCR), reverse-transcriptase (RT)-PCR, RNA PCR, LCR, multiplex PCR, panhandle PCR, capture PCR, expression PCR, 3′ and 5′ RACE, in situ PCR, ligation-mediated PCR and other amplification protocols.

[0133] As used herein, “primer pair” refers to a set of primers that includes a 5′ (upstream) primer that hybridizes with the 5′ end of a sequence to be amplified (e.g. by PCR) and a 3′ (downstream) primer that hybridizes with the complement of the 3′ end of the sequence to be amplified.

[0134] As used herein, “specifically hybridizes” refers to annealing, by complementary base-pairing, of a nucleic acid molecule (e.g. an oligonucleotide) to a target nucleic acid molecule. Those of skill in the art are familiar with in vitro and in vivo parameters that affect specific hybridization, such as length and composition of the particular molecule. Parameters particularly relevant to in vitro hybridization further include annealing and washing temperature, buffer composition and salt concentration. Exemplary washing conditions for removing non-specifically bound nucleic acid molecules at high stringency are 0.1×SSPE, 0.1% SDS, 65° C., and at medium stringency are 0.2×SSPE, 0.1% SDS, 50° C. Equivalent stringency conditions are known in the art. The skilled person can readily adjust these parameters to achieve specific hybridization of a nucleic acid molecule to a target nucleic acid molecule appropriate for a particular application. Complementary, when referring to two nucleotide sequences, means that the two sequences of nucleotides are capable of hybridizing, typically with less than 25%, 15% or 5% mismatches between opposed nucleotides. If necessary, the percentage of complementarity will be specified. Typically the two molecules are selected such that they will hybridize under conditions of high stringency.

[0135] As used herein, substantially identical to a product means sufficiently similar so that the property of interest is sufficiently unchanged so that the substantially identical product can be used in place of the product.

[0136] As used herein, it also is understood that the terms “substantially identical” or “similar” varies with the context as understood by those skilled in the relevant art.

[0137] As used herein, an “allelic variant” or “allelic variation” references any of two or more alternative forms of a gene occupying the same chromosomal locus. Allelic variation arises naturally through mutation, and can result in phenotypic polymorphism within populations. Gene mutations can be silent (no change in the encoded polypeptide) or can encode polypeptides having altered amino acid sequence. The term “allelic variant” also is used herein to denote a protein encoded by an allelic variant of a gene. Typically the reference form of the gene encodes a wildtype form and/or predominant form of a polypeptide from a population or single reference member of a species. Typically, allelic variants, which include variants between and among species typically have at least 80%, 90% or greater amino acid identity with a wildtype and/or predominant form from the same species; the degree of identity depends upon the gene and whether comparison is interspecies or intraspecies. Generally, intraspecies allelic variants have at least about 80%, 85%, 90% or 95% identity or greater with a wildtype and/or predominant form, including 96%, 97%, 98%, 99% or greater identity with a wildtype and/or predominant form of a polypeptide. Reference to an allelic variant herein generally refers to variations in proteins among members of the same species.

[0138] As used herein, “allele,” which is used interchangeably herein with “allelic variant” refers to alternative forms of a gene or portions thereof. Alleles occupy the same locus or position on homologous chromosomes. When a subject has two identical alleles of a gene, the subject is said to be homozygous for that gene or allele. When a subject has two different alleles of a gene, the subject is said to be heterozygous for the gene. Alleles of a specific gene can differ from each other in a single nucleotide or several nucleotides, and can include modifications such as substitutions, deletions and insertions of nucleotides. An allele of a gene also can be a form of a gene containing a mutation.

[0139] As used herein, species variants refer to variants in polypeptides among different species, including different mammalian species, such as mouse and human.

[0140] For example, for PH20, exemplary of species variants provided herein are primate PH20, such as, but not limited to, human, chimpanzee, macaque and cynomolgus monkey. Generally, species variants have 70%, 75%, 80%, 85%, 90%, 91%, 92%, 93%, 94%, 95%, 96%, 97%, 98% or sequence identity. Corresponding residues between and among species variants can be determined by comparing and aligning sequences to maximize the number of matching nucleotides or residues, for example, such that identity between the sequences is equal to or greater than 95%, equal to or greater than 96%, equal to or greater than 97%, equal to or greater than 98% or equal to greater than 99%. The position of interest is then given the number assigned in the reference nucleic acid molecule. Alignment can be effected manually or by eye, particularly, where sequence identity is greater than 80%.

[0141] As used herein, a human protein is one encoded by a nucleic acid molecule, such as DNA, present in the genome of a human, including all allelic variants and conservative variations thereof. A variant or modification of a protein is a human protein if the modification is based on the wildtype or prominent sequence of a human protein.

[0142] As used herein, a splice variant refers to a variant produced by differential processing of a primary transcript of genomic DNA that results in more than one type of mRNA.

[0143] As used herein, modification is in reference to modification of a sequence of amino acids of a polypeptide or a sequence of nucleotides in a nucleic acid molecule and includes deletions, insertions, and replacements (e.g. substitutions) of amino acids and nucleotides, respectively. Exemplary of modifications are amino acid substitutions. An amino-acid substituted polypeptide can exhibit 65%, 70%, 80%, 85%, 90%, 91%, 92%, 93%, 94%, 95%, 96%, 97%, 98% or more sequence identity to a polypeptide not containing the amino acid substitutions. Amino acid substitutions can be conservative or non-conservative. Generally, any modification to a polypeptide retains an activity of the polypeptide. Methods of modifying a polypeptide are routine to those of skill in the art, such as by using recombinant DNA methodologies.

[0144] As used herein, suitable conservative substitutions of amino acids are known to those of skill in the art and can be made generally without altering the biological activity of the resulting molecule. Those of skill in the art recognize that, in general, single amino acid substitutions in non-essential regions of a polypeptide do not substantially alter biological activity (see, e.g. Watson et al. in “Molecular Biology of the Gene,” 4th Edition, 1987, The Benjamin/Cummings Pub. co., p. 224). Such substitutions can be made in accordance with those set forth in Table 2 as follows:

TABLE 2

| | Exemplary |
|---|---|
| Original residue | conservative substitution |
| Ala (A) | Gly; Ser |
| Arg (R) | Lys |
| Asn (N) | Gln; His |
| Cys (C) | Ser |
| Gln (Q) | Asn |
| Glu (E) | Asp |
| Gly (G) | Ala; Pro |
| His (H) | Asn; Gln |
| Ile (I) | Leu; Val |
| Leu (L) | Ile; Val |
| Lys (K) | Arg; Gln; Glu |
| Met (M) | Leu; Tyr; Ile |
| Phe (F) | Met; Leu; Tyr |
| Ser (S) | Thr |
| Thr (T) | Ser |
| Trp (W) | Tyr |
| Tyr (Y) | Trp; Phe |
| Val (V) | Ile; Leu |

Other substitutions also are permissible and can be determined empirically or in accord with known conservative substitutions.

[0145] As used herein, the term “promoter” means a portion of a gene containing DNA sequences that provide for the binding of RNA polymerase and initiation of transcription. Promoter sequences are commonly, but not always, found in the 5′ non-coding region of genes.

[0146] As used herein, an isolated or purified polypeptide or protein or biologically-active portion thereof is substantially free of cellular material or other contaminating proteins from the cell or tissue from which the protein is derived, or substantially free from chemical precursors or other chemicals when chemically synthesized. Preparations can be determined to be substantially free if they appear free of readily detectable impurities as determined by standard methods of analysis, such as thin layer chromatography (TLC), gel electrophoresis and high performance liquid chromatography (HPLC), used by those of skill in the art to assess such purity, or sufficiently pure such that further purification would not detectably alter the physical and chemical properties, such as enzymatic and biological activities, of the substance. Methods for purification of the compounds to produce substantially chemically pure compounds are known to those of skill in the art. A substantially chemically pure compound, however, can be a mixture of stereoisomers. In such instances, further purification might increase the specific activity of the compound.

[0147] Hence, reference to a substantially purified polypeptide, such as a substantially purified soluble PH20, refers to preparations of proteins that are substantially free of cellular material and includes preparations of proteins in which the protein is separated from cellular components of the cells from which it is isolated or recombinantly-produced. In one embodiment, the term “substantially free of cellular material” includes preparations of enzyme proteins having less that about 30% (by dry weight) of non-enzyme proteins (also referred to herein as a contaminating protein), generally less than about 20% of non-enzyme proteins or 10% of non-enzyme proteins or less that about 5% of non-enzyme proteins. When the enzyme protein is recombinantly produced, it also is substantially free of culture medium, i.e. culture medium represents less than about or at 20%, 10% or 5% of the volume of the enzyme protein preparation.

[0148] As used herein, the term substantially free of chemical precursors or other chemicals includes preparations of enzyme proteins in which the protein is separated from chemical precursors or other chemicals that are involved in the synthesis of the protein. The term includes preparations of enzyme proteins having less than about 30% (by dry weight), 20%, 10%, 5% or less of chemical precursors or non-enzyme chemicals or components.

[0149] As used herein, synthetic, with reference to, for example, a synthetic nucleic acid molecule or a synthetic gene or a synthetic peptide refers to a nucleic acid molecule or polypeptide molecule that is produced by recombinant methods and/or by chemical synthesis methods.

[0150] As used herein, production by recombinant means or using recombinant DNA methods means the use of the well-known methods of molecular biology for expressing proteins encoded by cloned DNA.

[0151] As used herein, vector (or plasmid) refers to discrete elements that are used to introduce a heterologous nucleic acid into cells for either expression or replication thereof. The vectors typically remain episomal, but can be designed to effect integration of a gene or portion thereof into a chromosome of the genome. Also contemplated are vectors that are artificial chromosomes, such as yeast artificial chromosomes and mammalian artificial chromosomes. Selection and use of such vehicles are well known to those of skill in the art.

[0152] As used herein, an expression vector includes vectors capable of expressing DNA that is operatively linked with regulatory sequences, such as promoter regions, that are capable of effecting expression of such DNA fragments. Such additional segments can include promoter and terminator sequences, and optionally can include one or more origins of replication, one or more selectable markers, an enhancer, or a polyadenylation signal. Expression vectors are generally derived from plasmid or viral DNA, or can contain elements of both. Thus, an expression vector refers to a recombinant DNA or RNA construct, such as a plasmid, a phage, recombinant virus or other vector that, upon introduction into an appropriate host cell, results in expression of the cloned DNA. Appropriate expression vectors are well known to those of skill in the art and include those that are replicable in eukaryotic cells and/or prokaryotic cells and those that remain episomal or those which integrate into the host cell genome.

[0153] As used herein, vector also includes “virus vectors” or “viral vectors.” Viral vectors are engineered viruses that are operatively linked to exogenous genes to transfer (as vehicles or shuttles) the exogenous genes into cells.

[0154] As used herein, “operably” or “operatively linked” when referring to DNA segments means that the segments are arranged so that they function in concert for their intended purposes, e.g. transcription initiates downstream of the promoter and upstream of any transcribed sequences. The promoter is usually the domain to which the transcriptional machinery binds to initiate transcription and proceeds through the coding segment to the terminator.

[0155] As used herein the term “assessing” is intended to include quantitative and qualitative determination in the sense of obtaining an absolute value for the activity of a protein, such as an enzyme, or a domain thereof, present in the sample, and also of obtaining an index, ratio, percentage, visual or other value indicative of the level of the activity. Assessment can be direct or indirect. For example, the chemical species actually detected need not of course be the enzymatically cleaved product itself but can for example be a derivative thereof or some further substance. For example, detection of a cleavage product can be a detectable moiety such as a fluorescent moiety.

[0156] As used herein, biological activity refers to the in vivo activities of a compound or physiological responses that result upon in vivo administration of a compound, composition or other mixture. Biological activity, thus, encompasses therapeutic effects and pharmaceutical activity of such compounds, compositions and mixtures. Biological activities can be observed in in vitro systems designed to test or use such activities. Thus, for purposes herein a biological activity of a hyaluronidase enzyme is its degradation of hyaluronic acid.

[0157] As used herein, equivalent, when referring to two sequences of nucleic acids, means that the two sequences in question encode the same sequence of amino acids or equivalent proteins. When equivalent is used in referring to two proteins or peptides, it means that the two proteins or peptides have substantially the same amino acid sequence with only amino acid substitutions that do not substantially alter the activity or function of the protein or peptide. When equivalent refers to a property, the property does not need to be present to the same extent (e.g. two peptides can exhibit different rates of the same type of enzymatic activity), but the activities are usually substantially the same.

[0158] As used herein, “modulate” and “modulation” or “alter” refer to a change of an activity of a molecule, such as a protein. Exemplary activities include, but are not limited to, biological activities, such as signal transduction. Modulation can include an increase in the activity (i.e. up-regulation or agonist activity), a decrease in activity (i.e. down-regulation or inhibition) or any other alteration in an activity (such as a change in periodicity, frequency, duration, kinetics or other parameter). Modulation can be context dependent and typically, modulation is compared to a designated state, for example, the wildtype protein, the protein in a constitutive state, or the protein as expressed in a designated cell type or condition.

[0159] As used herein, direct administration refers to a composition that is administered without dilution.

[0160] As used herein, a single dosage formulation refers to a formulation for use only once. Typically, a single dosage formulation is for direct administration.

[0161] As used herein, a multiple dosage formulation refers to a formulation for use in repeat administrations.

[0162] As used herein, a composition refers to any mixture. It can be a solution, suspension, liquid, powder, paste, aqueous, non-aqueous or any combination thereof.

[0163] As used herein, a combination refers to any association between or among two or more items. The combination can be two or more separate items, such as two compositions or two collections, can be a mixture thereof, such as a single mixture of the two or more items, or any variation thereof. The elements of a combination are generally functionally associated or related.

[0164] As used herein, “intravenous administration” refers to delivery of a therapeutic directly into a vein.

[0165] As used herein, “treating” a subject with a disease or condition means that the subject's symptoms are partially or totally alleviated, or remain static following treatment. Hence, treatment encompasses prophylaxis, therapy and/or cure. Prophylaxis refers to prevention of a potential disease and/or a prevention of worsening of symptoms or progression of a disease.

[0166] As used herein, a pharmaceutically effective agent includes any therapeutic agent or bioactive agent, including, but not limited to, for example, chemotherapeutics, anesthetics, vasoconstrictors, dispersing agents, conventional therapeutic drugs, including small molecule drugs and therapeutic proteins.

[0167] As used herein, treatment means any manner in which the symptoms of a condition, disorder or disease or other indication, are ameliorated or otherwise beneficially altered.

[0168] As used herein, therapeutic effect means an effect resulting from treatment of a subject that alters, typically improves or ameliorates the symptoms of a disease or condition or that cures a disease or condition. A therapeutically effective amount refers to the amount of a composition, molecule or compound which results in a therapeutic effect following administration to a subject.

[0169] As used herein, the term “subject” refers to an animal, including a mammal, such as a human being.

[0170] As used herein, a patient refers to a human subject exhibiting symptoms of a disease or disorder.

[0171] As used herein, “about the same” means within an amount that one of skill in the art would consider to be the same or to be within an acceptable range of error. For example, typically, for pharmaceutical compositions, within at least 1%, 2%, 3%, 4%, 5% or 10% is considered about the same. Such amount can vary depending upon the tolerance for variation in the particular composition by subjects.

[0172] As used herein, dosing regime refers to the amount of agent, for example, the composition containing an hyalruonan-degrading enzyme, for example a soluble hyaluronidase or other agent, administered, and the frequency of administration. The dosing regime is a function of the disease or condition to be treated, and thus can vary.

[0173] As used herein, frequency of administration refers to the time or interval between successive administrations of treatment. For example, frequency can be days, weeks or months. For example, frequency can be more than once weekly, for example, twice a week, three times a week, four times a week, five times a week, six times a week or daily. Frequency also can be one, two, three or four weeks. The particular frequency is a function of the particular disease or condition treated. Generally, frequency is more than once weekly, and generally is twice weekly.

[0174] As used herein, a “cycle of administration” refers to the repeated schedule of the dosing regime of administration of the agent, such as a hyaluronan-degrading enzyme, that is repeated over successive administrations. For example, an exemplary cycle of administration is a 28 day cycle with administration twice weekly for three weeks, followed by one-week of discontinued dosing.

[0175] As used herein, when referencing dosage based on mg/kg of the subject, an average human subject is considered to have a mass of about 70 kg-75 kg, such as 70 kg and a body surface area (BSA) of 1.73.

[0176] As used herein, a “therapeutically effective amount” or a “therapeutically effective dose” refers to the quantity of an agent, compound, material, or composition containing a compound that is at least sufficient to produce a therapeutic effect. Hence, it is the quantity necessary for preventing, curing, ameliorating, arresting or partially arresting a symptom of a disease or disorder.

[0177] As used herein, a corticosteroid refers to a group of hormones that are naturally, synthetically or recombinantly generated, and that have an activity of a natural hormone that is secreted by the adrenal cortex. Corticosteroids can influence biological process, including, but not limited to, carbohydrate and protein metabolism, maintenance of serum glucose levels, electrolyte and water balance, and functions of the cardiovascular system, the skeletal muscle, the kidneys, and other organs. Corticosteroids include glucocorticoids, mineralcorticoids and corticotropins.

[0178] As used herein, a glucocorticoid is a corticosteroid that exhibits anti-inflammatory activity, and that also can affect glucose utilization, fat metabolism and bone development. Exemplary hormones that exhibit a glucocorticoid activity include, but are not limited to cortisone, hydrocortisone, dexamethasone, prednisone, prednisolone, betamethasone and triamcinolone.

[0179] As used herein, “adverse effect” or “side effect” refers to a harmful, deleterious and/or undesired effect of administering an agent, such as a polymer- (e.g. PEG) conjugated hyaluronan-degrading enzyme, such as PEGPH20, to a subject. Exemplary of side effects are musculoskeletal side effects. Side effects or adverse effects are graded on toxicity and various toxicity scales exist providing definitions for each grade. Exemplary of such scales are toxicity scales of the National Cancer Institute Common Toxicity Criteria version 2.0, the World Health Organization or Common Terminology Criteria for Adverse Events (CTCAE) scale. Generally, the scale is as follows: Grade 1=mild side effects; Grade 2=moderate side effects; Grade 3=Severe side effects; Grade 4=Life Threatening or Disabling side-effects; Grade 5=Fatal. Assigning grades of severity is within the experience of a physician or other health care professional.

[0180] As used herein, “musculoskeletal effect” or “musculoskeletal side effect” refers to effects on the system of muscles, tendons, ligaments, bones, joints and associated tissues. Musculoskeletal side effects include muscle and joint pain, stiffness of upper and lower extremities, cramping, myositis, muscle soreness and tenderness over the entire body, weakness, fatigue and a decrease in range of motion at knee and elbow joints. It is within the level of a skilled physician to assign grades of severity of observed or measured musculoskeletal side effects based on toxicity scales. It also is within the level of a skilled physician to assign a dose limiting toxicity (DLT) to an observed musculoskeletal side effect.

[0181] As used herein, “ameliorating,” “preventing,” or “reducing” a side effect or adverse event, or variations thereof, refers to lessening adverse effects or side effects, whether permanent or temporary, lasting or transient. For purposes herein, a side effect of an administered hyaluronan-degrading enzyme, such as a musculoskeletal side effect, is deemed ameliorated by a corticosteroid when there is a reduction or lessening in the grade of severity measured on a toxicity scale for the side effect in the presence of the corticosteroid compared to in its absence. In one example, a side effect is ameliorated when the observed or measured toxicity of an administered anti-hyaluronan agent (observed following single dosage administration, multiple dosage administration or by virtue of the dosage regime) of Grade 3 or higher is reduced to a Grade 1 or Grade 2 in the presence of a corticosteroid. In another example, a side effect is ameliorated when the DLT of an administered anti-hyaluronan agent is eliminated or increased following administration of the corticosteroid. For example, a side effect is ameliorated when a DLT of 0.05 mg/mL from an administered anti-hyaluronan agent is eliminated or increased by administration of a corticosteroid to the subject, such that the same dose or a higher dose of an anti-hyaluronan agent can be administered with reduced side effect or when the DLT is increased to greater than 0.05 mg/mL, such as 0.5 mg/mL.

[0182] As used herein, unit dose form refers to physically discrete units suitable for human and animal subjects and packaged individually as is known in the art.

[0183] As used herein, a single dosage formulation refers to a formulation as a single dose.

[0184] As used herein, formulation for direct administration means that the composition does not require further dilution for administration.

[0185] As used herein, an “article of manufacture” is a product that is made and sold. As used throughout this application, the term is intended to encompass anti-hyaluronan agents, for example hyaluronan-degrading enzyme, such as hyaluronidase, and second agent compositions contained in articles of packaging. For example, a second agent is a corticosteroid.

[0186] As used herein, fluid refers to any composition that can flow. Fluids thus encompass compositions that are in the form of semi-solids, pastes, solutions, aqueous mixtures, gels, lotions, creams and other such compositions.

[0187] As used herein, a combination, such as a combination of compositions provided herein, refers to an association of elements of the combination.

[0188] As used herein, a kit refers to a combination of components, such as a combination of the compositions herein and another item for a purpose including, but not limited to, reconstitution, activation, and instruments/devices for delivery, administration, diagnosis, and assessment of a biological activity or property. Kits optionally include instructions for use.

[0189] As used herein, a cellular extract or lysate refers to a preparation or fraction which is made from a lysed or disrupted cell.

[0190] As used herein, animal includes any animal, such as, but not limited to primates, including humans, gorillas and monkeys; rodents, such as mice and rats; fowl, such as chickens; ruminants, such as goats, cows, deer and sheep; pigs; and other animals. Non-human animals exclude humans as the contemplated animal. The hyaluronidases provided herein are from any source, including animal, plant, prokaryotic and fungal. Most hyaluronidases are of animal origin, including mammalian origin. Generally, hyaluronidases are of human origin.

[0191] As used herein, a control refers to a sample that is substantially identical to the test sample, except that it is not treated with a test parameter, or, if it is a plasma sample, it can be from a normal volunteer not affected with the condition of interest. A control also can be an internal control.

[0192] As used herein, the singular forms “a,” “an” and “the” include plural referents unless the context clearly dictates otherwise. Thus, for example, reference to a compound comprising or containing “an extracellular domain” includes compounds with one or a plurality of extracellular domains.

[0193] As used herein, ranges and amounts can be expressed as “about” a particular value or range. About also includes the exact amount. Hence “about 5 bases” means “about 5 bases” and also “5 bases.”

[0194] As used herein, “optional” or “optionally” means that the subsequently described event or circumstance does or does not occur, and that the description includes instances where said event or circumstance occurs and instances where it does not. For example, an optionally substituted group means that the group is unsubstituted or is substituted.

[0195] As used herein, the abbreviations for any protective groups, amino acids and other compounds, are, unless indicated otherwise, in accord with their common usage, recognized abbreviations, or the IUPAC-IUB Commission on Biochemical Nomenclature (see, Biochem. 11:1726 (1972)).

### B. METHODS FOR TREATING INSULIN RESISTANCE

[0196] Provided herein are methods of treating, ameliorating or reversing insulin resistance. In particular, the methods provided herein include methods of administering a polymer-conjugated hyaluronan-degrading enzyme, for example a hyaluronidase, such as PEGPH20, for use in the treatment, amelioration or reversal of insulin resistance. The methods provided herein can be used to reduce the hyaluronic acid (HA) content in the extracellular matrix (ECM) of insulin resistant tissue, for example in the ECM of muscle. The methods provided herein can be used in the treatment or prevention of any disease or condition associated with insulin resistance, such as diabetes or cardiovascular disease, by reducing, preventing or reversing the onset of disease.

[0197] 1. Normal Glucose/Insulin Action

[0198] A continuous supply of glucose is necessary to ensure proper function and survival of all organs. In response to an elevation in plasma glucose and amino acids, for example, after consumption of a meal, insulin is released from the β cells of the islets of Langerhans in the pancreas. In an effort to maintain an ambient plasma glucose concentration of between ˜80 and 140 mg/dL, the pancreatic β cells will secrete whatever amount of insulin is required to maintain this concentration. As blood glucose levels are lowered, insulin output is reduced, with the result that blood glucose is maintained at approximately 5 mmol/L (90 mg/dL).

[0199] In individuals with normal metabolism, insulin stimulates glucose uptake, utilization, and storage in insulin sensitive tissues, while suppressing hepatic (liver) glucose production and release. Once secreted, insulin stimulates the transport of glucose into muscle and fat cells by increasing the concentration of the glucose transporter isoform Glut4 at the cell surface. This results in a 10- to 40-fold increase in cellular glucose uptake. Thus, the action of insulin to lower blood glucose levels results from suppression of hepatic glucose production and increased glucose uptake into muscle and fat. Insulin is also involved in the inhibition of lipolysis, the breakdown of lipids involving hydrolysis of triglycerides into free fatty acids (FFA), in adipocytes.

[0200] The primary targets for insulin are skeletal and cardiac muscle, adipose (fat) tissue, and the liver. Muscle has long been considered the major site of insulin-stimulated glucose uptake in vivo, with adipose tissue contributing relatively little to total body glucose disposal. For example, skeletal muscle plays an integral role in regulating whole-body homeostasis, with approximately 70-80% of ingested glucose taken up by skeletal muscle and either stored as glycogen or oxidized for energy. Skeletal muscle oxidative capacity can be a key predictor of whole-body insulin action.

[0201] 2. Insulin Resistance

[0202] Insulin resistance is a physiological condition characterized by an inadequate response by insulin-sensitive tissues, such as the liver, skeletal muscle and adipose tissue, to normal circulating concentrations of insulin, resulting in increased blood glucose levels (i.e. hyperglycemia). In individuals with insulin resistance, insulin becomes less effective at lowering blood sugars by failing to inhibit hepatic glucose production, lipolysis, and skeletal muscle glucose uptake, leading to relative hyperglycemia and increased plasma levels of FFA.

[0203] A connection exists between obesity, reduced skeletal muscle fatty acid oxidation, and insulin resistance. Insulin-stimulated glucose transport is markedly decreased in the skeletal muscle of obese individuals and in patients with type 2 diabetes. Since skeletal muscle is the primary site of glucose uptake in the human body, its inability to utilize glucose in response to insulin could explain the reduced disposal of glucose observed in insulin-resistant individuals.

[0204] There are a number of contributing factors responsible for insulin resistance. Insulin resistance can result from a combination of genetic and environmental factors, and is a common condition associated with obesity, aging, and a sedentary lifestyle. For example, obesity is regarded as a pathological condition with abnormal fat accumulation as a result of relatively excessive calorie intake due to genetic and environmental conditions, and is a target or medical treatment. The occurrence of obesity and insulin resistance in the general population has resulted in it being considered to be an epidemic and a huge health problem. Insulin resistant individuals typically have elevated FFA concentrations compared to healthy individuals. Elevated FFA levels are not directly responsible for insulin resistance, but in obesity-induced insulin resistance, skeletal muscle is faced with increasing amounts of lipid which it is unable to oxidize. As a consequence, lipids accumulate within the muscle cell, and play a role in the development of insulin resistance. Insulin resistance also is associated with defects in the vasculature of tissues, including skeletal muscle. To be effective, insulin must enter the bloodstream from pancreatic β-cells where it circulates to various tissues and cells and exits the bloodstream to reach target tissues to mediate its effects (Richards et al. (2010) Endocrine Rev. 31:343-363). Insulin normally stimulates vasodilation, thereby effecting capillary or microvascular recruitment, in order to increase nutritive blood flow and promote transport of insulin and glucose to the muscle interstitium (Richards et al. (2010) Endocrine Rev. 31:343-363). Tissues from obese/insulin-resistant subjects, including skeletal muscle, generally have fewer capillaries and more large vessels as compared with lean subjects. For example, insulin resistance is associated with a decreased blood flow, which can be due to decreased capillarization in skeletal muscle (Lind et al. (1993) Am. Heart. J. 125:1494-1497). The effect of decreased tissue vascularization, and in particular muscle vascularization, reduces the ability of insulin and other metabolites and nutrients to reach tissue cells where they can be utilized. Indeed, it has been demonstrated that the movement of insulin within the muscle interstitium is impaired in insulin resistance (Richards et al. (2010) Endocrine Rev. 31:343-363).

[0205] In response to the relative hyperglycemia, there is a compensatory response by the pancreatic β cells, which secrete more insulin. The more resistant an individual is to insulin-mediated glucose disposal, the greater will be the degree of compensatory hyperinsulinemia, a condition in which there are excess levels of insulin circulating in the blood than required relative to the level of glucose. The excess insulin increases skeletal muscle glucose uptake and inhibits hepatic glucose production in order to maintain normal blood glucose levels (normoglycemia). Thus, insulin resistant individuals maintain normoglycemia through overproduction and secretion of insulin. Long-term insulin resistance and overproduction and secretion of insulin eventually leads to pancreatic β cell failure, resulting initially in pre-diabetes and glucose intolerance and later progressing to hyperglycemia and type 2 diabetes. Besides being a fundamental aspect of the etiology of type 2 diabetes, insulin resistance is also an early marker for a number of diseases and conditions including hypertension, dyslipidemia, fatty liver, atherosclerosis, cardiovascular disease, the metabolic syndrome, and polycystic ovarian disease.

[0206] 3. Hyaluronan and Insulin Resistance

[0207] It is found herein that hyaluronan (HA) is increased in the ECM of insulin resistant tissue, in particular in skeletal muscle, and is associated with insulin resistance. The extracellular matrix (ECM) is a complex structural entity surrounding and supporting the cells in tissues. The ECM is constituted by diverse composite structures, which determine the physical characteristics of tissues and many of the biological properties of cells embedded in it. The ECM not only provides strength and physical support for tissues and organisms, but also exerts profound influences on the embedded cells, playing an essential role in organogenesis, growth, function, and many human diseases. The ECM is a reservoir for a wide range of biomolecules such as growth factors, enzymes, cytokines and hormones. In addition, the ECM communicates directly or indirectly with the intracellular signaling pathways that direct cells to carry out specific functions. The ECM also provides a mesh through which cells and other macromolecules can move.

[0208] The major components of the ECM are fibrous proteins that provide tensile strength (e.g. various collagens and elastin), multi-adhesive matrix proteins (e.g. fibronectin, laminin, and tenascin) that attach cells to diverse components of the ECM, and proteoglycans (PGs) that are largely responsible for the volume of the ECM. Different combinations of these components tailor the strength of the ECM for different purposes.

[0209] Hyaluronan (or hyaluronic acid, hyaluronate, HA), is a large, negatively charged, unbranched polymer. It is a non-sulfated glycosaminoglycan composed of repeating polymeric disaccharides of D-glucuronic acid and N-acetyl-D-glucosamine linked by a glucuronidic β(1,3) bond ([-β(1,4)-GlcUA-β(1,3)-GlcNAc-]ₙ). In normal physiological conditions, HA is made up of 2,000-25,000 disaccharides, corresponding to polysaccharides with relative molecular masses of 10⁶-10⁷ and polymer lengths of 2-25 μm. Although HA belongs to the family of glycosaminoglycans, it differs from other glycosaminoglycans in many ways. Other glycosaminoglycans are made as proteoglycans that are synthesized and assembled in the rough endoplasmic reticulum and Golgi apparatus, and are secreted in a similar way to other glycoproteins. HA, however, is synthesized as an unmodified polysaccharide and extruded through the plasma membrane onto the cell surface or into the ECM while it is being synthesized.

[0210] HA is widely distributed and abundant in the ECM, especially in skeletal tissue. After synthesis and extrusion, HA forms a highly viscous gel, creating a barrier to bulk fluid flow through the interstitial collagenous matrix due to its viscosity and ability to retain water, thus making the ECM resilient to compression. HA has multiple functions, such as space filling, hydration, lubrication of joints, and providing a matrix through which cells can migrate. Due to HA's ability to regulate the porosity and malleability of the ECM and its interactions with proteoglycans and other extracellular macromolecules that are important in the assembly of extracellular and pericellular matrices, HA is an important contributor and regulator of ECM remodeling.

[0211] HA also is an ECM component that normally regulates vascular integrity (Lennon et al. (2011) Am. J. Cardiovasc. Dis. 1:200-213). The predominant form of HA associated with the vasculature in vivo is a high molecular weight HA that associates with other ECM components, including proteoglycans and other glycosaminoglycans and other serum proteins, to make up endothelial glycocalyx located on the luminal side of the endothelium of blood vessels. The endothelial glycocalyx exhibits vasculoprotective properties such as regulating vascular permeability. The HA is aqueous and exhibits viscous and elastic properties that contribute to the filtering function of the endothelial glycocalyx.

[0212] It is found herein that HA is increased in insulin resistant skeletal muscle. Due to the role of HA in many cellular processes, including in vascular integrity, it is believed that its aberrant accumulation in skeletal muscle is associated with the development and progression of insulin resistance and associated diseases and conditions characterized by insulin resistance. For example, the role of accumulated or increased HA to decreased vascularization is confirmed by studies herein that show that removing HA using a hyaluronan-degrading enzyme results in increased muscle vascularization as assessed by the vascular marker CD31. This demonstrates that increased HA in skeletal muscle likely acts as a physical barrier and as a persistent factor in skeletal muscle insulin resistance due to decreased muscle vascularization and decreased accessibility of glucose and insulin.

[0213] 4. Targeting HA by Hyaluronan-Degrading Enzyme to Reverse Insulin Resistance

[0214] Based on the findings herein that HA is increased in insulin resistant skeletal muscle and is associated with insulin resistance, a method for reversing or preventing insulin resistance by targeting removal of HA is provided herein. Hyaluronan-degrading enzymes, such as hyaluronidases, are a family of enzymes that degrade HA by cleaving the hyaluronan disaccharide polymers. Hyaluronan-degrading enzymes generally include enzymes that cleave the β-1→4 glycosidic bond in the hyaluronan chain or polymer. Hyaluronan-degrading enzymes also include enzymes that catalyze the cleavage of the β1→6 glycosidic bond in the hyaluronan chain or polymer. Thus, the matrix-associated HA polymers are degraded to small tetrasaccharide and hexasaccharide products. Hyaluronan-degrading enzymes, such as hyaluronidases (e.g. PH20) that degrade hyaluronan can reduce the hyaluronan such that the tissue deflates, the blood vessels expand, and more blood can flow through the site. This results in a diminishment of the interstitial fluid pressure at the tissue site and an associated increase in vascular perfusion. Thus, reducing HA in skeletal muscle of insulin resistant subjects by a hyaluronan-degrading enzyme can improve access of all hormones and metabolites delivered by the vasculature, including insulin and glucose, and improve overall muscle health.

[0215] While hyaluronidase has been demonstrated to exhibit anti-diabetogenic effects, these effects have been noted in animal models of type 1 diabetes (Weiss et al. (2000) Proc. Natl. Acad. Sci. U.S.A. 97:285-290). This is the first demonstration that hyaluronan-degrading enzymes, such as hyaluronidase for example PH20, can be used to ameliorate or reduce or prevent insulin resistance, and diseases or conditions associated with insulin resistance, such as type 2 diabetes and cardiovascular disease.

[0216] Hence, provided herein are methods or uses of a hyaluronan-degrading enzyme for reversing or preventing insulin resistance in a subject. As shown herein, administration of the hyaluronan-degrading enzyme PH20 to insulin-resistant subjects resulted in a reduction in HA levels in muscle ECM by 80%, and is associated with a decrease in fat mass, a decrease in basal arterial insulin, improved insulin action as assessed by a higher glucose infusion rate (GIR) during a hyperinsulinemic euglycemic clamp, decrease in plasma non-esterified fatty acid (NEFA), and increased insulin signaling. In addition, the effect was not limited to the skeletal muscle, as insulin-induced suppression of liver glucose production also was increased. These results demonstrate that ECM HA is linked to insulin resistance, and that administration of a hyaluronan-degrading enzyme can reverse insulin resistance.

[0217] Hyaluronan-degrading enzymes, however, can exhibit a short half-life when administered systemically. For example, unmodified hyaluronan-degrading enzyme typically has a short half-life of enzymatic activity in blood of minutes, generally less than 5 minutes. Since the substrate HA is replaced with a half-life of approximately 5 hours, in order to achieve therapeutic activity extended half-life of a hyaluronan-degrading enzyme is required. Therefore, in the methods and uses herein of treating or reversing insulin resistance, and thereby preventing the onset of associated diseases and conditions, a hyaluronan-degrading enzyme conjugated to a polymer is administered. Such an enzyme exhibits greatly increased half-life of hours (e.g. 5 to 10 hours or more), while maintaining therapeutic efficacy in vivo. For example, it is found herein that administration of a polymer-conjugated hyaluronan-degrading enzyme exhibits sufficient therapeutic activity to remove HA in muscle ECM, which is maintained at a decreased level for up to 72 hours.

[0218] HA, however, normally exhibits a robust ability for regeneration as it is rapidly turned over in the body, with, for example, a half-life of 15-20 hours in the skin, due to the action of hyaluronidases. It is shown herein that the ability for resynthesis and regeneration of HA means that acute administration (e.g. one injection) of a polymer-conjugated hyaluronan-degrading enzyme does not affect insulin action. In contrast, chronic administration of a hyaluronan-degrading enzyme over the course of a dosage regime cycle, which effects a chronic reduction in HA and limited to no regeneration or resynthesis of HA, exhibits substantial effects on improving insulin action and reversing insulin resistance. These results show that chronic HA reduction results in a long-term adaptation of the muscle ECM to effect improved muscle vascularization and accessibility of metabolic substances such as glucose and insulin. In addition, HA reduction results in a marked decrease in fat mass. The decrease in fat mass could contribute to reversing insulin resistance.

[0219] The following sections describe exemplary polymer-conjugated hyaluronan-degrading enzyme for use in treating or reversing insulin resistance, and in preventing the occurrence of insulin resistant-associated diseases or conditions. Exemplary dosage regimes and methods are described.

### C. HYALURONAN-DEGRADING ENZYMES AND POLYMER-CONJUGATED HYALURONAN-DEGRADING ENZYMES

[0220] Provided herein are methods and uses of a hyaluronan-degrading enzyme for reducing or ameliorating insulin resistance, where the hyaluronan-degrading enzyme is modified to exhibit increased half-life compared to the hyaluronan-degrading enzyme that is not so modified. For example, the hyaluronan-degrading enzyme for use in the methods herein exhibits a half-life of at least 1 hour, and generally at least 2 hours, 3 hours, 4 hours, 5 hours, 6 hours, 7 hours, 8 hours, 9 hours, 10 hours, 11 hours, 12 hours or more. Generally, the provided compositions for use in the methods contain a hyaluronan-degrading enzyme, in particular a hyaluronidase, such as a soluble hyaluronidases (e.g. a PH20 or truncated PH20), that has been modified by conjugation to one or more polymeric molecule (polymer). The effect of polymer conjugation, such as with a PEG moiety, increases the half-life of the hyaluronan-degrading enzyme, for example, to promote prolonged/sustained treatment effects in a subject.

[0221] Hyaluronan (HA or hyaluronic acid) is a component of the extracellular matrix and a major constituent of the interstitial barrier. Hyaluronan-degrading enzymes, such as hyaluronidases, are a family of enzymes that degrade hyaluronic acid, which is an essential component of the extracellular matrix and a major constituent of the interstitial barrier. Hyaluronan-degrading enzymes act to degrade hyaluronan by cleaving hyaluronan polymers, which are composed of repeating disaccharides units, D-glucuronic acid (GlcA) and N-acetyl-D-glucosamine (GlcNAc), linked together via alternating β-1→4 and β1→3 glycosidic bonds. Hyaluronan chains can reach about 25,000 disaccharide repeats or more in length and polymers of hyaluronan can range in size from about 5,000 to 20,000,000 Da in vivo. By catalyzing the hydrolysis of hyaluronic acid, a major constituent of the interstitial barrier, hyaluronan-degrading enzymes lower the viscosity of hyaluronic acid, thereby increasing tissue permeability.

[0222] Accordingly, hyaluronan-degrading enzymes for the uses and methods provided herein include any enzyme having the ability to catalyze the cleavage of a hyaluronan disaccharide chain or polymer. In some examples, the hyaluronan-degrading enzyme cleaves the β-1→4 glycosidic bond in the hyaluronan chain or polymer. In other examples, the hyaluronan-degrading enzyme catalyzes the cleavage of the β1→6 glycosidic bond in the hyaluronan chain or polymer.

[0223] Hyaluronan-degrading enzymes include hyaluronidases, as well as other enzymes such as chondrotinases and lyases that have the ability to cleave hyaluronan. Further, hyaluronan-degrading enzymes also include soluble forms thereof that can be expressed and secreted from cells. As described below, hyaluronan-degrading enzymes exist in membrane-bound or soluble forms that are secreted from cells. For purposes herein, soluble hyaluronan-degrading enzymes are provided for use in the methods and uses herein. Thus, where hyaluronan-degrading enzymes include a glycosylphosphatidylinositol (GPI) anchor and/or are otherwise membrane-anchored or insoluble, such hyaluronan-degrading enzymes can be provided in soluble form by truncation or deletion of the GPI anchor to render the enzyme secreted and soluble. Thus, hyaluronan-degrading enzymes include truncated variants, e.g. truncated to remove all or a portion of a GPI anchor. Exemplary of such soluble hyaluronidases are soluble PH20 hyaluronides, such as any set forth in U.S. Pat. No. 7,767,429; U.S. Publication Nos. US 2004/0268425 or US 2010/0143457.

[0224] Hyaluronan-degrading enzymes provided herein also include variants of any hyaluronan-degrading enzyme, such as any hyaluronidase or soluble hyaluronidase, for example a PH20, that is known to one of skill in the art or described herein. For example, hyaluronan-degrading enzymes can contain one or more variations in its primary sequence, such as amino acid substitutions, additions and/or deletions. A variant of a hyaluronan-degrading enzyme generally exhibits at least or about 60%, 70%, 80%, 90%, 91%, 92%, 93%, 94%, 95%, 96%, 97%, 98%, 99% or more sequence identity compared to the hyaluronan-degrading enzyme not containing the variation. Any variation can be included in the hyaluronan-degrading enzyme for the purposes herein, provided the enzyme retains hyaluronidase activity, such as at least or about 5%, 10%, 15%, 20%, 25%, 30%, 35%, 40%, 45%, 50%, 55%, 60%, 65%, 70%, 75%, 80%, 85%, 90%, 95% or more of the activity of a hyaluronan-degrading enzyme not containing the variation (as measured by in vitro and/or in vivo assays well known in the art and described herein). For example, exemplary of hyaluronan-degrading enzymes, including those that can be conjugated to a polymer, are any set forth in any of SEQ ID NOS:1, 2, 4-9, 47, 48, 150-170, 183-189 and 199-210, or any that exhibit at least or about 60%, 70%, 80%, 90%, 91%, 92%, 93%, 94%, 95%, 96%, 97%, 98%, 99% or more sequence identity to any of SEQ ID NOS:1, 2, 4-9, 47, 48, 150-170, 183-189 and 199-210.

[0225] Various forms of hyaluronan-degrading enzymes, including hyaluronidases, have been prepared and approved for therapeutic use in subjects, including humans. For example, animal-derived hyaluronidase preparations include Vitrase® (ISTA Pharmaceuticals), a purified ovine testicular hyaluronidase, Amphadase® (Amphastar Pharmaceuticals), a bovine testicular hyaluronidase and Hydase™ (Prima Pharm Inc.), a bovine testicular hyaluronidase. Hylenex® (Halozyme Therapeutics) is a human recombinant hyaluronidase produced by genetically engineered Chinese Hamster Ovary (CHO) cells containing nucleic acid encoding soluble forms of PH20, designated rHuPH20 (see, e.g. U.S. Publication No. US 2004/0268425 and U.S. Pat. No. 7,767,429). It is understood that any hyaluronidase preparation can be used in the combinations, methods and uses provided herein (see, e.g. U.S. Pat. Nos. 2,488,564; 2,488,565; 2,676,139; 2,795,529; 2,806,815, 2,808,362; 5,747,027; 5,827,721; 7,767,429; U.S. Publication No. US 2004/0268425; and International PCT Application No. WO 2005/118799), or any provided herein.

[0226] A non-limiting description of exemplary hyaluronan-degrading enzymes, such as hyaluronidase enzymes or soluble hyaluronidase enzymes, for example PH20, for use in the methods provided herein are described below. Generally, such hyaluronan-degrading enzymes include those that are conjugated to a polymer.

[0227] 1. Hyaluronidases

[0228] Hyaluronidases are members of a large family of hyaluronan-degrading enzymes. There are three general classes of hyaluronidases: mammalian-type hyaluronidases, bacterial hyaluronidases and hyaluronidases from leeches, other parasites and crustaceans. Such enzymes can be used in the compositions and methods provided herein.

[0229] a. Mammalian-Type Hyaluronidases

[0230] Mammalian-type hyaluronidases (EC 3.2.1.35) are endo-β-N-acetylhexosaminidases that hydrolyze the β-1→4 glycosidic bond of hyaluronan into various oligosaccharide lengths such as tetrasaccharides and hexasaccharides. These enzymes have both hydrolytic and transglycosidase activities, and can degrade hyaluronan and chondroitin sulfates (CS), generally C4-S and C6-S. Hyaluronidases of this type include, but are not limited to, from cows (bovine) (SEQ ID NOS:10, 11, 64, 203 and 204 and nucleic acid molecules set forth in SEQ ID NOS:190-192), sheep (Ovis aries) (SEQ ID NO:26, 27, 63 and 65, nucleic acid molecules set forth in SEQ ID NOS:66 and 193-194), yellow jacket wasp (SEQ ID NOS:12 and 13), honey bee (SEQ ID NO:14), white-face hornet (SEQ ID NO:15), paper wasp (SEQ ID NO:16), mouse (SEQ ID NOS:17-19, 32, 205), pig (SEQ ID NOS:20-21), rat (SEQ ID NOS:22-24, 31, 206), rabbit (SEQ ID NO:25, 207), orangutan (SEQ ID NO:28), cynomolgus monkey (SEQ ID NO:29, 202), guinea pig (SEQ ID NO:30, 208), chimpanzee (SEQ ID NO:101, 199, 200), rhesus monkey (SEQ ID NO:102, 201), fox (SEQ ID NO:209 and 210) and human hyaluronidases (SEQ ID NOS:1-2, 36-39). The above hyaluronidases include PH20 hyaluronidases. Also, BH55 hyaluronidase is of this type as described in U.S. Pat. Nos. 5,747,027 and 5,827,721. Exemplary of hyaluronidases in the compositions and methods provided herein are soluble hyaluronidases.

[0231] Mammalian hyaluronidases can be further subdivided into those that are neutral active, predominantly found in testes extracts, and acid active, predominantly found in organs such as the liver. Exemplary neutral active hyaluronidases include PH20, including but not limited to, PH20 derived from different species such as ovine (SEQ ID NOS:27, 63 and 65), bovine (SEQ ID NO:11 and 64) and human (SEQ ID NO:1). Human PH20 (also known as SPAM 1 or sperm surface protein PH20), is generally attached to the plasma membrane via a glycosylphosphatidyl inositol (GPI) anchor. It is naturally involved in sperm-egg adhesion and aids penetration by sperm of the layer of cumulus cells by digesting hyaluronic acid.

[0232] Besides human PH20 (also termed SPAM 1), five hyaluronidase-like genes have been identified in the human genome, HYAL1, HYAL2, HYAL3, HYAL4 and HYALP1. HYALP1 is a pseudogene, and HYAL3 (SEQ ID NO:38) has not been shown to possess enzyme activity toward any known substrates. HYAL4 (precursor polypeptide set forth in SEQ ID NO:39) is a chondroitinase and exhibits little activity towards hyaluronan. HYAL1 (precursor polypeptide set forth in SEQ ID NO:36) is the prototypical acid-active enzyme and PH20 (precursor polypeptide set forth in SEQ ID NO:1) is the prototypical neutral-active enzyme. Acid-active hyaluronidases, such as HYAL1 and HYAL2 (precursor polypeptide set forth in SEQ ID NO:37) generally lack catalytic activity at neutral pH (i.e. pH 7). For example, HYAL1 has little catalytic activity in vitro over pH 4.5 (Frost et al. (1997) Anal. Biochem. 251:263-269). HYAL2 is an acid-active enzyme with a very low specific activity in vitro. The hyaluronidase-like enzymes also can be characterized by those which are generally attached to the plasma membrane via a glycosylphosphatidyl inositol (GPI) anchor such as human HYAL2 and human PH20 (Danilkovitch-Miagkova et al. (2003) Proc. Natl. Acad. Sci. U.S.A. 100(8):4580-4585), and those which are generally soluble such as human HYAL1 (Frost et al. (1997) Biochem. Biophys. Res. Commun. 236(1):10-15).

### PH20

[0233] PH20, like other mammalian hyaluronidases, is an endo-β-N-acetyl-hexosaminidase that hydrolyzes the β1→4 glycosidic bond of hyaluronic acid into various oligosaccharide lengths such as tetrasaccharides and hexasaccharides. It has both hydrolytic and transglycosidase activities and can degrade hyaluronic acid and chondroitin sulfates, such as C4-S and C6-S. PH20 is naturally involved in sperm-egg adhesion and aids penetration by sperm of the layer of cumulus cells by digesting hyaluronic acid. PH20 is located on the sperm surface, and in the lysosome-derived acrosome, where it is bound to the inner acrosomal membrane. Plasma membrane PH20 has hyaluronidase activity only at neutral pH, while inner acrosomal membrane PH20 has activity at both neutral and acid pH. In addition to being a hyaluronidase, PH20 also appears to be a receptor for HA-induced cell signaling, and a receptor for the zona pellucida surrounding the oocyte.

[0234] Exemplary PH20 proteins, including precursor and mature forms, include, but are not limited to, human (precursor polypeptide set forth in SEQ ID NO:1, mature polypeptide set forth in SEQ ID NO:2), chimpanzee (SEQ ID NO:101, 199, 200), rhesus monkey (SEQ ID NO:102, 201) bovine (SEQ ID NOS:11 and 64, 203, 204), rabbit (SEQ ID NO:25, 207), ovine PH20 (SEQ ID NOS:27, 63 and 65), cynomolgus monkey (SEQ ID NO:29, 202), guinea pig (SEQ ID NO:30, 208), rat (SEQ ID NO:31, 206), mouse (SEQ ID NO:32, 205) and fox (SEQ ID NO:209 and 210) PH20 polypeptides.

[0235] Bovine PH20 is a 553 amino acid precursor polypeptide (SEQ ID NO:11). Alignment of bovine PH20 with the human PH20 shows only weak homology, with multiple gaps existing from amino acid 470 through to the respective carboxy termini due to the absence of a GPI anchor in the bovine polypeptide (see, e.g. Frost (2007) Expert Opin. Drug. Deliv. 4:427-440). In fact, clear GPI anchors are not predicted in many other PH20 species besides humans. Thus, PH20 polypeptides produced from ovine and bovine naturally exist as soluble forms. Though bovine PH20 exists very loosely attached to the plasma membrane, it is not anchored via a phospholipase sensitive anchor (Lalancette et al. (2001) Biol. Reprod. 65(2):628-636). This unique feature of bovine hyaluronidase has permitted the use of the soluble bovine testes hyaluronidase enzyme as an extract for clinical use (Wydase®, Hyalase®).

[0236] The human PH20 mRNA transcript is normally translated to generate a 509 amino acid precursor polypeptide (SEQ ID NO:1) containing a 35 amino acid signal sequence at the N-terminus (amino acid residue positions 1-35) and a 19 amino acid glycosylphosphatidylinositol (GPI) anchor attachment signal sequence at the C-terminus (amino acid residue positions 491-509). The mature PH20 therefore, is a 474 amino acid polypeptide set forth in SEQ ID NO:2. Following transport of the precursor polypeptide to the ER and removal of the signal peptide, the C-terminal GPI-attachment signal peptide is cleaved to facilitate covalent attachment of a GPI anchor to the newly-formed C-terminal amino acid at the amino acid position corresponding to position 490 of the precursor polypeptide set forth in SEQ ID NO:1. Thus, a 474 amino acid GPI-anchored mature polypeptide with an amino acid sequence set forth in SEQ ID NO:2 is produced.

[0237] Human PH20 exhibits hyaluronidase activity at neutral and acid pH. In one aspect, human PH20 is the prototypical neutral-active hyaluronidase that is generally locked to the plasma membrane via a GPI anchor. In another aspect, PH20 is expressed on the inner acrosomal membrane where it has hyaluronidase activity at neutral and acid pH. It appears that PH20 contains two catalytic sites at distinct regions of the polypeptide: the Peptide 1 and Peptide 3 regions (Chem et al. (2001) Matrix Biol. 20:515-525). Evidence indicates that the Peptide 1 region of PH20, which corresponds to amino acid positions 107-137 of the mature polypeptide set forth in SEQ ID NO:2 and positions 142-172 of the precursor polypeptide set forth in SEQ ID NO:1, is required for enzyme activity at neutral pH. Amino acids at positions 111 and 113 (corresponding to the mature PH20 polypeptide set forth in SEQ ID NO:2) within this region appear to be important for activity, as mutagenesis by amino acid replacement results in PH20 polypeptides with 3% hyaluronidase activity or undetectable hyaluronidase activity, respectively, compared to the wild-type PH20 (Arming et al. (1997) Eur. J. Biochem. 247:810-814).

[0238] The Peptide 3 region, which corresponds to amino acid positions 242-262 of the mature polypeptide set forth in SEQ ID NO:2, and positions 277-297 of the precursor polypeptide set forth in SEQ ID NO:1, appears to be important for enzyme activity at acidic pH. Within this region, amino acids at positions 249 and 252 of the mature PH20 polypeptide appear to be essential for activity, and mutagenesis of either one results in a polypeptide essentially devoid of activity (Arming et al. (1997) Eur. J. Biochem. 247:810-814).

[0239] In addition to the catalytic sites, PH20 also contains a hyaluronan-binding site. Experimental evidence indicate that this site is located in the Peptide 2 region, which corresponds to amino acid positions 205-235 of the precursor polypeptide set forth in SEQ ID NO:1 and positions 170-200 of the mature polypeptide set forth in SEQ ID NO:2. This region is highly conserved among hyaluronidases and is similar to the heparin binding motif. Mutation of the arginine residue at position 176 (corresponding to the mature PH20 polypeptide set forth in SEQ ID NO:2) to a glycine results in a polypeptide with only about 1% of the hyaluronidase activity of the wild type polypeptide (Arming et al. (1997) Eur. J. Biochem. 247:810-814).

[0240] There are seven potential N-linked glycosylation sites in human PH20 at N82, N166, N235, N254, N368, N393, N490 of the polypeptide exemplified in SEQ ID NO:1. Because amino acids 36 to 464 of SEQ ID NO:1 appear to contain the minimally active human PH20 hyaluronidase domain, the N-linked glycosylation site N-490 is not required for proper hyaluronidase activity. There are six disulfide bonds in human PH20. Two disulfide bonds between the cysteine residues C60 and C351 and between C224 and C238 of the polypeptide exemplified in SEQ ID NO:1 (corresponding to residues C25 and C316, and C189 and C203 of the mature polypeptide set forth in SEQ ID NO:2, respectively). A further four disulfide bonds are formed between between the cysteine residues C376 and C387; between C381 and C435; between C437 and C443; and between C458 and C464 of the polypeptide exemplified in SEQ ID NO:1 (corresponding to residues C341 and C352; between C346 and C400; between C402 and C408; and between C423 and C429 of the mature polypeptide set forth in SEQ ID NO:2, respectively).

[0241] b. Bacterial Hyaluronidases

[0242] Bacterial hyaluronidases (EC 4.2.2.1 or EC 4.2.99.1) degrade hyaluronan and, to various extents, chondroitin sulfates and dermatan sulfates. Hyaluronan lyases isolated from bacteria differ from hyaluronidases from other sources (e.g. hyaluronoglucosaminidases, EC 3.2.1.35) by their mode of action. They are endo-β-N-acetylhexosaminidases that catalyze an elimination reaction, rather than hydrolysis, of the β1→4-glycosidic linkage between N-acetyl-beta-D-glucosamine and D-glucuronic acid residues in hyaluronan, yielding 3-(4-deoxy-β-D-gluc-4-enuronosyl)-N-acetyl-D-glucosamine tetra- and hexasaccharides, and disaccharide end products. The reaction results in the formation of oligosaccharides with unsaturated hexuronic acid residues at their nonreducing ends.

[0243] Exemplary hyaluronidases from bacteria for use in the compositions, combinations and methods provided include, but are not limited to, hyaluronan-degrading enzymes in microorganisms, including strains of Arthrobacter, Bdellovibrio, Clostridium, Micrococcus, Streptococcus, Peptococcus, Propionibacterium. Bacteroides, and Streptomyces. Particular examples of such strains and enzymes include, but are not limited to Arthrobacter sp. (strain FB24) (SEQ ID NO:67), Bdellovibrio bacteriovorus (SEQ ID NO:68), Propionibacterium acnes (SEQ ID NO:69), Streptococcus agalactiae ((SEQ ID NO:70); 18RS21 (SEQ ID NO:71); serotype Ia (SEQ ID NO:72); serotype III (SEQ ID NO:73), Staphylococcus aureus (strain COL (SEQ ID NO:74); strain MRSA252 (SEQ ID NOS:75 and 76); strain MSSA476 (SEQ ID NO:77); strain NCTC 8325 (SEQ ID NO:78); strain bovine RF122 (SEQ ID NOS:79 and 80); strain USA300 (SEQ ID NO:81), Streptococcus pneumoniae ((SEQ ID NO:82); strain ATCC BAA-255/R6 (SEQ ID NO:83); serotype 2, strain D39/NCTC 7466 (SEQ ID NO:84), Streptococcus pyogenes (serotype M1) (SEQ ID NO:85); serotype M2, strain MGAS 10270 (SEQ ID NO:86); serotype M4, strain MGAS 10750 (SEQ ID NO:87); serotype M6 (SEQ ID NO:88); serotype M12, strain MGAS2096 (SEQ ID NOS:89 and 90); serotype M12, strain MGAS9429 (SEQ ID NO:91); serotype M28 (SEQ ID NO:92); Streptococcus suis (SEQ ID NOS:93-95); Vibrio fischeri (strain ATCC 700601/ESI 14 (SEQ ID NO:96)), and the Streptomyces hyaluronolyticus hyaluronidase enzyme, which is specific for hyaluronic acid and does not cleave chondroitin or chondroitin sulfate (Ohya and Kaneko (1970) Biochim. Biophys. Acta 198:607).

[0244] c. Hyaluronidases from Leeches, Other Parasites and Crustaceans

[0245] Hyaluronidases from leeches, other parasites, and crustaceans (EC 3.2.1.36) are endo-β-glucuronidases that generate tetra- and hexasaccharide end-products. These enzymes catalyze hydrolysis of 1→3-linkages between β-D-glucuronate and N-acetyl-D-glucosamine residues in hyaluronate. Exemplary hyaluronidases from leeches include, but are not limited to, hyaluronidase from Hirudinidae (e.g. Hirudo medicinalis), Erpobdellidae (e.g. Nephelopsis obscura and Erpobdella punctata,), Glossiphoniidae (e.g. Desserobdella pitta, Helobdella stagnalis, Glossiphonia complanata, Placobdella ornata and Theromyzon sp.) and Haemopidae (Haemopis marmorata) (Hovingh et al. (1999) Comp. Biochem. Physiol. B Biochem. Mol. Biol. 124(3):319-26). An exemplary hyaluronidase from bacteria that has the same mechanism of action as the leech hyaluronidase is that from the cyanobacteria, Synechococcus sp. (strain RCC307, SEQ ID NO:97).

[0246] 2. Other Hyaluronan-Degrading Enzymes

[0247] In addition to the hyaluronidase family, other hyaluronan-degrading enzymes can be used in the compositions and methods provided. For example, enzymes, including particular chondroitinases and lyases, that have the ability to cleave hyaluronan can be employed. Exemplary chondroitinases that can degrade hyaluronan include, but are not limited to, chondroitin ABC lyase (also known as chondroitinase ABC), chondroitin AC lyase (also known as chondroitin sulfate lyase or chondroitin sulfate eliminase) and chondroitin C lyase. Methods for production and purification of such enzymes for use in the compositions, combinations, and methods provided are known in the art (e.g. U.S. Pat. No. 6,054,569; Yamagata et al. (1968) J. Biol. Chem. 243(7):1523-1535; Yang et al. (1985) J. Biol. Chem. 160(30):1849-1857).

[0248] Chondroitin ABC lyase contains two enzymes, chondroitin-sulfate-ABC endolyase (EC 4.2.2.20) and chondroitin-sulfate-ABC exolyase (EC 4.2.2.21) (Hamai et al. (1997) J. Biol. Chem. 272(14):9123-30), which degrade a variety of glycosaminoglycans of the chondroitin-sulfate- and dermatan-sulfate type. Chondroitin sulfate, chondroitin-sulfate proteoglycan and dermatan sulfate are the preferred substrates for chondroitin-sulfate-ABC endolyase, but the enzyme also can act on hyaluronan at a lower rate. Chondroitin-sulfate-ABC endolyase degrades a variety of glycosaminoglycans of the chondroitin-sulfate- and dermatan-sulfate type, producing a mixture of Δ4-unsaturated oligosaccharides of different sizes that are ultimately degraded to Δ4-unsaturated tetra- and disaccharides. Chondroitin-sulfate-ABC exolyase has the same substrate specificity but removes disaccharide residues from the non-reducing ends of both polymeric chondroitin sulfates and their oligosaccharide fragments produced by chondroitin-sulfate-ABC endolyase (Hamai et al. (1997) J. Biol. Chem. 272:9123-9130). Exemplary chondroitin-sulfate-ABC endolyases and chondroitin-sulfate-ABC exolyases include, but are not limited to, those from Proteus vulgaris and Flavobacterium heparinum (the Proteus vulgaris chondroitin-sulfate-ABC endolyase is set forth in SEQ ID NO:98 (Sato et al. (1994) Appl. Microbiol. Biotechnol. 41(1):39-46).

[0249] Chondroitin AC lyase (EC 4.2.2.5) is active on chondroitin sulfates A and C, chondroitin and hyaluronic acid, but is not active on dermatan sulfate (chondroitin sulfate B). Exemplary chondroitinase AC enzymes from the bacteria include, but are not limited to, those from Flavobacterium heparinum and Victivallis vadensis, set forth in SEQ ID NOS:99 and 100, respectively, and Arthrobacter aurescens (Tkalec et al. (2000) Appl. Environ. Microbiol. 66(1):29-35; Ernst et al. (1995) Crit. Rev. Biochem. Mol. Biol. 30(5):387-444).

[0250] Chondroitinase C cleaves chondroitin sulfate C producing tetrasaccharide plus an unsaturated 6-sulfated disaccharide (delta Di-6S). It also cleaves hyaluronic acid producing unsaturated non-sulfated disaccharide (delta Di-OS). Exemplary chondroitinase C enzymes from the bacteria include, but are not limited to, those from Streptococcus and Flavobacterium (Hibi et al. (1989) FEMS Microbiol. Lett. 48(2):121-4; Michelacci et al. (1976) J. Biol. Chem. 251:1154-8; Tsuda et al. (1999) Eur. J. Biochem. 262:127-133).

[0251] 3. Soluble Hyaluronan-Degrading Enzymes

[0252] Provided in the compositions, uses and methods herein are soluble hyaluronan-degrading enzymes, including soluble hyaluronidases. Soluble hyaluronan-degrading enzymes include any hyaluronan-degrading enzymes that are secreted from cells (e.g. CHO cells) upon expression and exist in soluble form. Such enzymes include, but are not limited to, soluble hyaluronidases, including non-human soluble hyaluronidases, including non-human animal soluble hyaluronidases, bacterial soluble hyaluronidases and human hyaluronidases, Hyal1, bovine PH20 and ovine PH20, allelic variants thereof and other variants thereof. For example, included among soluble hyaluronan-degrading enzymes are any hyaluronan-degrading enzymes that have been modified to be soluble. For example, hyaluronan-degrading enzymes that contain a GPI anchor can be made soluble by truncation of and removal of all or a portion of the GPI anchor. In one example, the human hyaluronidase PH20, which is normally membrane-anchored via a GPI anchor, can be made soluble by truncation of and removal of all or a portion of the GPI anchor at the C-terminus.

[0253] Soluble hyaluronan-degrading enzymes also include neutral active and acid active hyaluronidases. Depending on factors such as, but not limited to, the desired level of activity of the enzyme following administration and/or site of administration, neutral active and acid active hyaluronidases can be selected. In a particular example, the hyaluronan-degrading enzyme for use in the compositions and methods herein is a soluble neutral active hyaluronidase.

[0254] Exemplary of a soluble hyaluronidase is PH20 from any species, such as any set forth in any of SEQ ID NOS:1, 2, 11, 25, 27, 29-32, 63-65 and 101-102, or truncated forms thereof lacking all or a portion of the C-terminal GPI anchor, so long as the hyaluronidase is soluble (secreted upon expression) and retains hyaluronidase activity. Also included among soluble hyaluronidases are variants of any of SEQ ID NOS:1, 2, 11, 25, 27, 29-32, 63-65 and 101-102, or truncated forms thereof, that exhibit hyaluronidase activity. Variants include polypeptides having 60%, 70%, 80%, 90%, 91%, 92%, 93%, 94%, 95%, 96%., 97%, 98%, 99% or more sequence identity to any of SEQ ID NOS:1, 2, 11, 25, 27, 29-32, 63-65 and 101-102, mature (e.g. lacking the signal sequence) or truncated forms thereof. Amino acid variants include conservative and non-conservative mutations. It is understood that residues that are important or otherwise required for the activity of a hyaluronidase, such as any described above or known to those of skill in the art, are generally invariant and cannot be changed. These include, for example, active site residues. Thus, for example, amino acid residues 111, 113 and 176 (corresponding to residues in the mature PH20 polypeptide set forth in SEQ ID NO:2) of a human PH20 polypeptide, or soluble form thereof, are generally invariant and are not altered. Other residues that confer glycosylation and formation of disulfide bonds required for proper folding also can be invariant.

[0255] In some instances, the soluble hyaluronan-degrading enzyme is normally GPI-anchored (such as, for example, human PH20) and is rendered soluble by truncation at the C-terminus. Such truncation can remove all of the GPI anchor attachment signal sequence, or can remove only some of the GPI anchor attachment signal sequence. The resulting polypeptide, however, is soluble. In instances where the soluble hyaluronan-degrading enzyme retains a portion of the GPI anchor attachment signal sequence, 1, 2, 3, 4, 5, 6, 7 or more amino acid residues in the GPI-anchor attachment signal sequence can be retained, provided the polypeptide is soluble. Polypeptides containing one or more amino acids of the GPI anchor are termed extended soluble hyaluronan-degrading enzymes. One of skill in the art can determine whether a polypeptide is GPI-anchored using methods well known in the art. Such methods include, but are not limited to, using known algorithms to predict the presence and location of the GPI-anchor attachment signal sequence and ω-site, and performing solubility analyses before and after digestion with phosphatidylinositol-specific phospholipase C(PI-PLC) or D (PI-PLD).

[0256] Extended soluble hyaluronan-degrading enzymes can be produced by making C-terminal truncations to any naturally GPI-anchored hyaluronan-degrading enzyme such that the resulting polypeptide is soluble and contains one or more amino acid residues from the GPI-anchor attachment signal sequence (see, e.g. U.S. Pub. No. US 2010/0143457). Exemplary extended soluble hyaluronan-degrading enzymes that are C-terminally truncated but retain a portion of the GPI anchor attachment signal sequence include, but are not limited to, extended soluble PH20 (esPH20) polypeptides of primate origin, such as, for example, human and chimpanzee esPH20 polypeptides. For example, the esPH20 polypeptides can be made by C-terminal truncation of any of the mature or precursor polypeptides set forth in SEQ ID NOS:1, 2 or 101, or other variants thereof, including active fragment thereof, wherein the resulting polypeptide is soluble and retains one or more amino acid residues from the GPI-anchor attachment signal sequence. Variants include polypeptides having 60%, 70%, 80%, 90%, 91%, 92%, 93%, 94%, 95% or more sequence identity to any of SEQ ID NOS:1 or 2 and that retain hyaluronidase activity. The esPH20 polypeptides provided herein can be C-terminally truncated by 1, 2, 3, 4, 5, 6, 7, 8, 9, 10 or more amino acids compared to the wild type polypeptide, such as a polypeptide with a sequence set forth in SEQ ID NOS:1, 2 or 101, provided the resulting esPH20 polypeptide is soluble and retains 1 or more amino acid residues from the GPI-anchor attachment signal sequence.

[0257] Typically, for use in the compositions and methods herein, a soluble human hylauronan-degrading enzyme, such as a soluble human PH20, is used. Although hylauronan-degrading enzymes, such as PH20, from other animals can be utilized, such preparations are potentially immunogenic, since they are animal proteins. For example, a significant proportion of patients demonstrate prior sensitization secondary to ingested foods, and since these are animal proteins, all patients have a risk of subsequent sensitization. Thus, non-human preparations may not be suitable for chronic use. If non-human preparations are desired, it is contemplated herein that such polypeptides can be prepared to have reduced immunogenicity. Such modifications are within the level of one of skill in the art and can include, for example, removal and/or replacement of one or more antigenic epitopes on the molecule.

[0258] Hyaluronan-degrading enzymes, including hyaluronidases (e.g. PH20), used in the methods herein can be recombinantly produced or can be purified or partially-purified from natural sources, such as, for example, from testes extracts. Methods for production of recombinant proteins, including recombinant hyaluronan-degrading enzymes, are provided elsewhere herein and are well known in the art.

[0259] a. Soluble Human PH20

[0260] Exemplary of a soluble hyaluronidase is soluble human PH20, Soluble forms of recombinant human PH20 have been produced and can be used in the compositions and methods described herein. The production of such soluble forms of PH20 is described in U.S. Pub. Nos. US 2004/0268425; US 2005/0260186; US 2006/0104968; US 2010/0143457; and International PCT App. No. WO 2009/111066. For example, soluble PH20 polypeptides include C-terminally truncated variant polypeptides that include a sequence of amino acids in SEQ ID NOS:1 or 2, or have at least 91%, 92%, 93%, 94%, 95%, 95%, 97%, 98% sequence identity to a sequence of amino acids included in SEQ ID NO:1 or 2, retain hyaluronidase activity and are soluble. Included among these polypeptides are soluble PH20 polypeptides that completely lack all or a portion of the GPI-anchor attachment signal sequence.

[0261] Also included are extended soluble PH20 (esPH20) polypeptides that contain at least one amino acid of the GPI anchor. Thus, instead of having a GPI-anchor covalently attached to the C-terminus of the protein in the ER and being anchored to the extracellular leaflet of the plasma membrane, these polypeptides are secreted and are soluble. C-terminally truncated PH20 polypeptides can be C-terminally truncated by 1, 2, 3, 4, 5, 6, 7, 8, 9, 10, 11, 12, 13, 14, 15, 16, 17, 18, 19, 20, 25, 30, 35, 40, 45, 50, 55, 60 or more amino acids compared to the full length wild type polypeptide, such as a full length wild type polypeptide with a sequence set forth in SEQ ID NOS:1 or 2, or allelic or species variants or other variants thereof.

[0262] For example, soluble forms include, but are not limited to, C-terminal truncated polypeptides of human PH20 set forth in SEQ ID NO:1 having a C-terminal amino acid residue 467, 468, 469, 470, 471, 472, 473, 474, 475, 476, 477, 478, 479, 480, 481, 482, 483, 484, 485, 486, 487, 488, 489, 490, 491, 492, 493, 494, 495, 496, 497, 498, 499 or 500 of the sequence of amino acids set forth in SEQ ID NO:1, or polypeptides that exhibit at least 85% identity thereto. Soluble forms of human PH20 generally include those that contain amino acids 36-464 set forth in SEQ ID NO:1. For example, when expressed in mammalian cells, the 35 amino acid N-terminal signal sequence is cleaved during processing, and the mature form of the protein is secreted. Thus, the mature soluble polypeptides contain amino acids 36 to 467, 468, 469, 470, 471, 472, 473, 474, 475, 476, 477, 478, 479, 480, 481, 482, 483, 484, 485, 486, 487, 488, 489, 490, 491, 492, 493, 494, 495, 496, 497, 498, 499 or 500 of SEQ ID NO:1. Table 3 provides non-limiting examples of exemplary C-terminally truncated PH20 polypeptides, including C-terminally truncated soluble PH20 polypeptides. In Table 3 below, the length (in amino acids) of the precursor and mature polypeptides, and the sequence identifier (SEQ ID NO) in which exemplary amino acid sequences of the precursor and mature polypeptides of the C-terminally truncated PH20 proteins are set forth, are provided. The wild-type PH20 polypeptide also is included in Table 3 for comparison. In particular, exemplary of soluble hyaluronidases are soluble human PH20 polypeptides that are 442, 443, 444, 445, 446 or 447 amino acids in length, such as set forth in any of SEQ ID NOS:4-9, or allelic or species variants or other variants thereof.

TABLE 3
Exemplary C-terminally truncated PH20 polypeptides

| | | | | Mature |
|---|---|---|---|---|
| | Precursor | Precursor | Mature | SEQ |
| Polypeptide | (amino acids) | SEQ ID NO | (amino acids) | ID NO |
| wildtype | 509 | 1 | 474 | 2 |
| SPAM1-SILF | 500 | 139 | 465 | 183 |
| SPAM-VSIL | 499 | 106 | 464 | 150 |
| SPAM1-IVSI | 498 | 140 | 463 | 184 |
| SPAM1-FIVS | 497 | 107 | 462 | 151 |
| SPAM1-MFIV | 496 | 141 | 461 | 185 |
| SPAM1-TMFI | 495 | 108 | 460 | 152 |
| SPAM1-ATMF | 494 | 142 | 459 | 186 |
| SPAM1-SATM | 493 | 109 | 458 | 153 |
| SPAM1-LSAT | 492 | 143 | 457 | 187 |
| SPAM1-TLSA | 491 | 110 | 456 | 154 |
| SPAM1-PSTL | 489 | 111 | 454 | 155 |
| SPAM1-SPST | 488 | 144 | 453 | 188 |
| SPAM1-STLS | 490 | 112 | 455 | 156 |
| SPAM1-ASPS | 487 | 113 | 452 | 157 |
| SPAM1-NASP | 486 | 145 | 451 | 189 |
| SPAM1-YNAS | 485 | 114 | 450 | 158 |
| SPAM1-FYNA | 484 | 115 | 449 | 159 |
| SPAM1-IFYN | 483 | 46 | 448 | 48 |
| SPAM1-QIFY | 482 | 3 | 447 | 4 |
| SPAM1-PQIF | 481 | 45 | 446 | 5 |
| SPAM1-EPQI | 480 | 44 | 445 | 6 |
| SPAM1-EEPQ | 479 | 43 | 444 | 7 |
| SPAM1-TEEP | 478 | 42 | 443 | 8 |
| SPAM1-ETEE | 477 | 41 | 442 | 9 |
| SPAM1-METE | 476 | 116 | 441 | 160 |
| SPAM1-PMET | 475 | 117 | 440 | 161 |
| SPAM1-PPME | 474 | 118 | 439 | 162 |
| SPAM1-KPPM | 473 | 119 | 438 | 163 |
| SPAM1-LKPP | 472 | 120 | 437 | 164 |
| SPAM1-FLKP | 471 | 121 | 436 | 165 |
| SPAM1-AFLK | 470 | 122 | 435 | 166 |
| SPAM1-DAFL | 469 | 123 | 434 | 167 |
| SPAM1-IDAF | 468 | 124 | 433 | 168 |
| SPAM1-CIDA | 467 | 40 | 432 | 47 |
| SPAM1-VCID | 466 | 125 | 431 | 169 |
| SPAM1-GVCI | 465 | 126 | 430 | 170 |

[0263] Generally, soluble forms of PH20 are produced using protein expression systems that facilitate correct N-glycosylation to ensure the polypeptide retains activity, since glycosylation is important for the catalytic activity and stability of hyaluronidases. Such cells include, for example, Chinese Hamster Ovary (CHO) cells (e.g. DG44 CHO cells). Other C-terminally truncated PH20 polypeptides, including precursor and mature forms, are set forth in any of SEQ ID NOS: 103-105, 127-138, 146-149 and 171-182.

[0264] b. rHuPH20

[0265] Recombinant soluble forms of human PH20 have been generated and can be used in the compositions and methods provided herein. The generation of such soluble forms of recombinant human PH20 are described, for example, in U.S. Pub. Nos. US 2004/0268425; US 2005/0260186; US 2006/0104968; US 2010/0143457; and International PCT App. No. WO 2009/111066. Exemplary of such polypeptides are those generated by expression of a nucleic acid molecule encoding amino acids 1-482 (set forth in SEQ ID NO:3). Such an exemplary nucleic acid molecule is set forth in SEQ ID NO:49. Post translational processing removes the 35 amino acid signal sequence, leaving a 447 amino acid soluble recombinant human PH20 (SEQ ID NO:4). As produced in the culture medium there is heterogeneity at the C-terminus such that the product, designated rHuPH20, includes a mixture of species that can include any one or more of SEQ ID NOS:4-9 in various abundance. Typically, rHuPH20 is produced in cells that facilitate correct N-glycosylation to retain activity, such as CHO cells (e.g. DG44 CHO cells).

[0266] 4. Glycosylation of Hyaluronan-Degrading Enzymes

[0267] Glycosylation, including N- and O-linked glycosylation, of some hyaluronan-degrading enzymes, including hyaluronidases, can be important for their catalytic activity and stability. While altering the type of glycan modifying a glycoprotein can have dramatic affects on a protein's antigenicity, structural folding, solubility, and stability, most enzymes are not thought to require glycosylation for optimal enzyme activity. For some hyaluronidases, removal of N-linked glycosylation can result in near complete inactivation of the hyaluronidase activity. Thus, for such hyaluronidases, the presence of N-linked glycans is critical for generating an active enzyme.

[0268] N-linked oligosaccharides fall into several major types (oligomannose, complex, hybrid, sulfated), all of which have (Man) 3-GlcNAc-GlcNAc-cores attached via the amide nitrogen of Asn residues that fall within -Asn-Xaa-Thr/Ser-sequences (where Xaa is not Pro). Glycosylation at an -Asn-Xaa-Cys-site has been reported for coagulation protein C. In some instances, a hyaluronan-degrading enzyme, such as a hyaluronidase, can contain both N-glycosidic and O-glycosidic linkages. For example, PH20 has O-linked oligosaccharides as well as N-linked oligosaccharides. There are seven potential N-linked glycosylation sites at N82, N166, N235, N254, N368, N393, N490 of human PH20 exemplified in SEQ ID NO:1. Amino acid residues N82, N166 and N254 are occupied by complex type glycans whereas amino acid residues N368 and N393 are occupied by high mannose type glycans. Amino acid residue N235 is occupied by approximately 80% high mannose-type glycans and 20% complex-type glycans. As noted above, N-linked glycosylation at N490 is not required for hyaluronidase activity.

[0269] In some examples, the hyaluronan-degrading enzymes for use in the compositions and methods provided are glycosylated at one or all of the glycosylation sites. For example, for human PH20 or a soluble form thereof, 2, 3, 4, 5, or 6 of the N-glycosylation sites corresponding to amino acids N82, N166, N235, N254, N368, and N393 of SEQ ID NO:1 are glycosylated. In some examples, the hyaluronan-degrading enzymes are glycosylated at one or more native glycosylation sites. In other examples, the hyaluronan-degrading enzymes are modified at one or more non-native glycosylation sites to confer glycosylation of the polypeptide at one or more additional sites. In such examples, attachment of additional sugar moieties can enhance the pharmacokinetic properties of the molecule, such as improved half-life and/or improved activity.

[0270] In other examples, the hyaluronan-degrading enzymes for use in the compositions and methods provided herein are partially deglycosylated (or N-partially glycosylated polypeptides). For example, partially deglycosylated soluble PH20 polypeptides that retain all or a portion of the hyaluronidase activity of a fully glycosylated hyaluronidase can be used in the compositions, combinations and/or methods provided herein. Exemplary partially deglycosylated hyalurodinases include soluble forms of partially deglycosylated PH20 polypeptides from any species, such as any set forth in any of SEQ ID NOS:1, 2, 11, 25, 27, 29-32, 63, 65, and 101-102, or allelic variants, truncated variants, or other variants thereof. Such variants are known to one of skill in the art, and include polypeptides having 60%, 70%, 80%, 90%, 91%, 92%, 93%, 94%, 95% or more sequence identity to any of SEQ ID NOS:1, 2, 11, 25, 27, 29-32, 63, 65, and 101-102, or truncated forms thereof. The partially deglycosylated hyaluronidases provided herein also include hybrid, fusion and chimeric partially deglycosylated hyaluronidases, and partially deglycosylated hyaluronidase conjugates.

[0271] Glycosidases, or glycoside hydrolases, are enzymes that catalyze the hydrolysis of the glycosidic linkage to generate two smaller sugars. The major types of N-glycans in vertebrates include high mannose glycans, hybrid glycans and complex glycans. There are several glycosidases that result in only partial protein deglycosylation, including: EndoF1, which cleaves high mannose- and hybrid-type glycans; EndoF2, which cleaves biantennary complex-type glycans; EndoF3, which cleaves biantennary and more branched complex glycans; and EndoH, which cleaves high mannose- and hybrid-type glycans. Treatment of a hyaluronan-degrading enzyme, such as a soluble hyaluronidase, such as a soluble PH20, with one or all of these glycosidases can result in only partial deglycosylation and, therefore, retention of hyaluronidase activity.

[0272] Partially deglycosylated hyaluronan-degrading enzymes, such as partially deglycosylated soluble hyaluronidases, can be produced by digestion with one or more glycosidases, generally a glycosidase that does not remove all N-glycans but only partially deglycosylates the protein. For example, treatment of PH20 (e.g. a recombinant PH20 designated rHuPH20) with one or all of the above glycosidases (e.g. EndoF1, EndoF2 and/or EndoF3) results in partial deglycosylation. These partially deglycosylated PH20 polypeptides can exhibit hyaluronidase enzymatic activity that is comparable to the fully glycosylated polypeptides. In contrast, treatment of PH20 with PNGaseF, a glycosidase that cleaves all N-glycans, results in complete removal of all N-glycans and thereby renders PH20 enzymatically inactive. Thus, although all N-linked glycosylation sites (such as, for example, those at amino acids N82, N166, N235, N254, N368, and N393 of human PH20, exemplified in SEQ ID NO:1) can be glycosylated, treatment with one or more glycosidases can render the extent of glycosylation reduced compared to a hyaluronidase that is not digested with one or more glycosidases.

[0273] The partially deglycosylated hyaluronan-degrading enzymes, including partially deglycosylated soluble PH20 polypeptides, can have 10%, 20%, 30%, 40%, 50%, 60%, 70% or 80% of the level of glycosylation of a fully glycosylated polypeptide. In one example, 1, 2, 3, 4, 5 or 6 of the N-glycosylation sites corresponding to amino acids N82, N166, N235, N254, N368 and N393 of SEQ ID NO:1 are partially deglycosylated, such that they no longer contain high mannose- or complex-type glycans, but rather contain at least an N-acetylglucosamine moiety. In some examples, 1, 2 or 3 of the N-glycosylation sites corresponding to amino acids N82, N166 and N254 of SEQ ID NO:1 are deglycosylated, that is, they do not contain a sugar moiety. In other examples, 3, 4, 5 or 6 of the N-glycosylation sites corresponding to amino acids N82, N166, N235, N254, N368 and N393 of SEQ ID NO:1 are glycosylated. Glycosylated amino acid residues minimally contain an N-acetylglucosamine moiety. Typically, the partially deglycosylated hyaluronan-degrading enzymes, including partially deglycosylated soluble PH20 polypeptides, exhibit hyaluronidase activity that is 10%, 20%, 30%, 40%, 50%, 60%, 70%, 80%, 90%, 100%, 110%, 120%, 130%, 140%, 150%, 200%, 300%, 400%, 500%, 1000% or more of the hyaluronidase activity exhibited by the fully glycosylated polypeptide.

[0274] 5. Modified (Polymer-Conjugated) Hyaluronan-Degrading Enzymes

[0275] Covalent or other stable attachment (conjugation) of polymeric molecules, such as polyethylene glycol (PEGylation moiety (PEG)), to the hyaluronan-degrading enzymes, such as hyaluronidases, impart beneficial properties to the resulting hyaluronan-degrading enzyme-polymer composition. Such properties include improved biocompatibility, extension of protein (and enzymatic activity) half-life in the blood, cells and/or in other tissues within a subject, effective shielding of the protein from proteases and hydrolysis, improved biodistribution, enhanced pharmacokinetics and/or pharmacodynamics, and increased water solubility.

[0276] Exemplary polymers that can be conjugated to the hyaluronan-degrading enzyme, such as the hyaluronidase, include natural and synthetic homopolymers, such as polyols (i.e. poly-OH), polyamines (i.e. poly-NH₂) and polycarboxyl acids (i.e. poly-COOH), and further heteropolymers, i.e. polymers containing one or more different coupling groups, for example, hydroxyl groups and amine groups. Examples of suitable polymeric molecules include polymeric molecules selected from among polyalkylene oxides (PAO), such as polyalkylene glycols (PAG), including polyethylene glycols (PEG), methoxypolyethylene glycols (mPEG) and polypropylene glycols, PEG-glycidyl ethers (Epox-PEG), PEG-oxycarbonylimidazole (CDI-PEG) branched polyethylene glycols (PEGs), polyvinyl alcohol (PVA), poly(ethyleneimine) (PEI), linear polyamidoamines, polyacrylamide (PAAm), polydimethylacrylamide (PDAAm), polyvinyl alchol (PVA), polycarboxylates, polyvinylpyrrolidone (PVP), poly-D,L-amino acids, polyethylene-co-maleic acid anhydride, polystyrene-co-maleic acid anhydride, dextrans including carboxymethyl-chitosan, dextrin, dextrans, heparin, homologous albumin, celluloses, including methylcellulose, carboxymethylcellulose, ethylcellulose, hydroxyethylcellulose carboxyethylcellulose and hydroxypropylcellulose, hydrolysates of chitosan, starches such as hydroxyethyl-starches and hydroxypropyl-starches, glycogen, agaroses and derivatives thereof, guar gum, pullulan, inulin, xanthan gum, carrageenan, pectin, alginic acid hydrolysates and bio-polymers.

[0277] Typically, the polymers are polyalkylene oxides (PAO), such as polyethylene oxides, such as PEG, typically mPEG, which, in comparison to polysaccharides such as dextran and pullulan, have few reactive groups capable of cross-linking. Typically, the polymers are non-toxic polymeric molecules such as (m)polyethylene glycol (mPEG) which can be covalently conjugated to the hyaluronan-degrading enzyme, such as the hyaluronidase (e.g. to attachment groups on the protein's surface) using relatively simple chemistry.

[0278] PEGylation of therapeutics has been reported to increase resistance to proteolysis, increase plasma half-life, and decrease antigenicity and immunogenicity. Examples of PEGylation methodologies are known in the art (see for example, Lu and Felix (1994) Int. J. Peptide Protein Res. 43:127-138; Lu and Felix (1993) Peptide Res. 6:140-146; Felix et al. (1995) Int. J. Peptide Res. 46:253-264; Benhar et al. (1994) J. Biol. Chem. 269:13398-13404; Brumeanu et al. (1995) J. Immunol, 154:3088-3095; see also, Caliceti et al. (2003) Adv. Drug Deliv. Rev. 55(10):1261-1277 and Molineux (2003) Pharmacother. 23(8 Pt 2):3S-8S). PEGylation also can be used in the delivery of nucleic acid molecules in vivo. For example, PEGylation of adenovirus can increase stability and gene transfer (see, e.g. Cheng et al. (2003) Pharm. Res. 20(9):1444-1451).

[0279] Suitable polymeric molecules for attachment to the hyaluronan-degrading enzymes, including hyaluronidases, include, but are not limited to, polyethylene glycol (PEG) and PEG derivatives such as methoxy-polyethylene glycols (mPEG), PEG-glycidyl ethers (Epox-PEG), PEG-oxycarbonylimidazole (CDI-PEG), branched PEGs, and polyethylene oxide (PEO) (see, e.g. Roberts et al. (2002) Adv. Drug Deliv. Rev. 54:459-476; Harris and Zalipsky (eds.) “Poly(ethylene glycol), Chemistry and Biological Applications” ACS Symposium Series 680 (1997); Mehvar et al. (2000) J. Pharm. Pharmaceut. Sci. 3(1):125-136; Harris (2003) Nature Rev. Drug Discov. 2:214-221; and Tsubery (2004) J. Biol. Chem. 279(37):38118-24). The polymeric molecule can be of a molecular weight typically ranging from about 3 kDa to about 60 kDa. In some embodiments the polymeric molecule that is conjugated to a protein, such as a hyaluronidase, for example a PH20, has a molecular weight of between or about between 5 to 60 kDa, such as at least or about at least or 5, 10, 15, 20, 25, 30, 35, 40, 45, 50, 55, 60 or more than 60 kDa.

[0280] PEGylated Soluble Hyaluronan-Degrading Enzymes

[0281] The polymer-conjugated hyaluronan-degrading enzyme used in the methods herein can be a PEGylated hyaluronan-degrading enzyme, such as a PEGylated soluble hyaluronan-degrading enzyme. In one example, it is a PEGylated soluble hyaluronidase, e.g. PEGylated PH20. Various methods of modifying polypeptides by covalently attaching (conjugating) a PEG or PEG derivative (i.e. “PEGylation”) are known in the art (see, e.g. U.S. Pub. Nos. 2006/0104968 and 2004/0235734; U.S. Pat. Nos. 5,672,662 and 6,737,505). Techniques for PEGylation include, but are not limited to, specialized linkers and coupling chemistries (see, e.g. Roberts et al. (2002) Adv. Drug Deliv. Rev. 54:459-476), attachment of multiple PEG moieties to a single conjugation site (such as via use of branched PEGs; see, e.g. Guiotto et al. (2002) Bioorg. Med. Chem. Lett. 12:177-180), site-specific PEGylation and/or mono-PEGylation (see, e.g. Chapman et al. (1999) Nature Biotech. 17:780-783), and site-directed enzymatic PEGylation (see, e.g. Sato (2002) Adv. Drug Deliv. Rev. 54:487-504). Methods and techniques described in the art can produce proteins having 1, 2, 3, 4, 5, 6, 7, 8, 9, 10 or more than 10 PEG or PEG derivatives attached to a single protein molecule (see, e.g. U.S. Pub. No. 2006/0104968).

[0282] Numerous reagents for PEGylation have been described in the art. Such reagents include, but are not limited to, N-hydroxysuccinimidyl (NHS) activated PEG, succinimidyl mPEG, mPEG₂-N-hydroxysuccinimide, mPEG succinimidyl alpha-methylbutanoate, mPEG succinimidyl propionate, mPEG succinimidyl butanoate, mPEG carboxymethyl 3-hydroxybutanoic acid succinimidyl ester, homobifunctional PEG-succinimidyl propionate, homobifunctional PEG propionaldehyde, homobifunctional PEG butyraldehyde, PEG maleimide, PEG hydrazide, p-nitrophenyl-carbonate PEG, mPEG-benzotriazole carbonate, propionaldehyde PEG, mPEG butryaldehyde, branched mPEG₂ butyraldehyde, mPEG acetyl, mPEG piperidone, mPEG methylketone, mPEG “linkerless” maleimide, mPEG vinyl sulfone, mPEG thiol, mPEG orthopyridylthioester, mPEG orthopyridyl disulfide, Fmoc-PEG-NHS, Boc-PEG-NHS, vinylsulfone PEG-NHS, acrylate PEG-NHS, fluorescein PEG-NHS, and biotin PEG-NHS (see, e.g. Monfardini et al. (1995) Bioconj. Chem. 6:62-69; Veronese et al. (1997) J. Bioactive Compatible Polymers 12:197-207; U.S. Pat. No. 5,672,662; U.S. Pat. No. 5,932,462; U.S. Pat. No. 6,495,659; U.S. Pat. No. 6,737,505; U.S. Pat. No. 4,002,531; U.S. Pat. No. 4,179,337; U.S. Pat. No. 5,122,614; U.S. Pat. No. 5,324,844; U.S. Pat. No. 5,446,090; U.S. Pat. No. 5,612,460; U.S. Pat. No. 5,643,575; U.S. Pat. No. 5,766,581; U.S. Pat. No. 5,795,569; U.S. Pat. No. 5,808,096; U.S. Pat. No. 5,900,461; U.S. Pat. No. 5,919,455; U.S. Pat. No. 5,985,263; U.S. Pat. No. 5,990,237; U.S. Pat. No. 6,113,906; U.S. Pat. No. 6,214,966; U.S. Pat. No. 6,258,351; U.S. Pat. No. 6,340,742; U.S. Pat. No. 6,413,507; U.S. Pat. No. 6,420,339; U.S. Pat. No. 6,437,025; U.S. Pat. No. 6,448,369; U.S. Pat. No. 6,461,802; U.S. Pat. No. 6,828,401; U.S. Pat. No. 6,858,736; U.S. Pub. Nos. 2001/0021763; U.S. 2001/0044526; U.S. 2001/0046481; U.S. 2002/0052430; U.S. 2002/0072573; U.S. 2002/0156047; U.S. 2003/0114647; U.S. 2003/0143596; U.S. 2003/0158333; U.S. 2003/0220447; U.S. 2004/0013637; US 2004/0235734; U.S. 2005/0114037; U.S. 2005/0171328; U.S. 2005/0209416; International Pat. App. Nos. WO 2005/00360; WO 01/076640; WO 00/02017; WO 02/49673; WO 94/28024; WO 01/87925; and EP Pat. Nos. 1064951 and EP 0822199).

### D. METHODS OF PRODUCING NUCLEIC ACIDS AND ENCODED POLYPEPTIDES OF HYALURONAN-DEGRADING ENZYMES

[0283] Polypeptides of a hyaluronan-degrading enzyme, such as a soluble hyaluronidase, set forth herein, can be obtained by methods well known in the art for protein purification and recombinant protein expression. Any method known to those of skill in the art for identification of nucleic acids that encode desired genes can be used. Any method available in the art can be used to obtain a full length (i.e. encompassing the entire coding region) cDNA or genomic DNA clone encoding a hyaluronidase, such as from a cell or tissue source. Modified or variant soluble hyaluronidases can be engineered from a wildtype polypeptide, such as by site-directed mutagenesis.

[0284] Polypeptides can be cloned or isolated using any available methods known in the art for cloning and isolating nucleic acid molecules. Such methods include PCR amplification of nucleic acids and screening of libraries, including nucleic acid hybridization screening, antibody-based screening and activity-based screening.

[0285] Methods for amplification of nucleic acids can be used to isolate nucleic acid molecules encoding a desired polypeptide, including for example, polymerase chain reaction (PCR) methods. A nucleic acid-containing material can be used as a starting material from which a desired polypeptide-encoding nucleic acid molecule can be isolated. For example, DNA and mRNA preparations, cell extracts, tissue extracts, fluid samples (e.g. blood, serum, saliva), samples from healthy and/or diseased subjects can be used in amplification methods. Nucleic acid libraries also can be used as a source of starting material. Primers can be designed to amplify a desired polypeptide. For example, primers can be designed based on expressed sequences from which a desired polypeptide is generated. Primers can be designed based on back-translation of a polypeptide amino acid sequence. Nucleic acid molecules generated by amplification can be sequenced and confirmed to encode a desired polypeptide.

[0286] Additional nucleotide sequences can be joined to a polypeptide-encoding nucleic acid molecule, including linker sequences containing restriction endonuclease sites for the purpose of cloning the synthetic gene into a vector, for example, a protein expression vector or a vector designed for the amplification of the core protein coding DNA sequences. Furthermore, additional nucleotide sequences specifying functional DNA elements can be operatively linked to a polypeptide-encoding nucleic acid molecule. Examples of such sequences include, but are not limited to, promoter sequences designed to facilitate intracellular protein expression, and secretion sequences, for example heterologous signal sequences, designed to facilitate protein secretion. Such sequences are known to those of skill in the art. Additional nucleotide residue sequences such as sequences of bases specifying protein-binding regions also can be linked to enzyme-encoding nucleic acid molecules. Such regions include, but are not limited to, sequences of residues that facilitate or encode proteins that facilitate uptake of an enzyme into specific target cells, or otherwise alter pharmacokinetics of a product of a synthetic gene. For example, enzymes can be linked to PEG moieties.

[0287] In addition, tags or other moieties can be added, for example, to aid in detection or affinity purification of the polypeptide. For example, additional nucleotide residues sequences such as sequences of bases specifying an epitope tag or other detectable marker also can be linked to enzyme-encoding nucleic acid molecules. Exemplary of such sequences include nucleic acid sequences encoding a His tag (e.g. 6×His, HHHHHH; SEQ ID NO:54) or Flag Tag (DYKDDDDK; SEQ ID NO:55).

[0288] The identified and isolated nucleic acids can then be inserted into an appropriate cloning vector. A large number of vector-host systems known in the art can be used. Possible vectors include, but are not limited to, plasmids or modified viruses, but the vector system must be compatible with the host cell used. Such vectors include, but are not limited to, bacteriophages such as lambda derivatives, or plasmids such as pCMV4, pBR322 or pUC plasmid derivatives, or the Bluescript vector (Stratagene, La Jolla, Calif.). Other expression vectors include the HZ24 expression vector exemplified herein. The insertion into a cloning vector can, for example, be accomplished by ligating the DNA fragment into a cloning vector which has complementary cohesive termini. Insertion can be effected using TOPO cloning vectors (Invitrogen, Carlsbad, Calif.). If the complementary restriction sites used to fragment the DNA are not present in the cloning vector, the ends of the DNA molecules can be enzymatically modified. Alternatively, any site desired can be produced by ligating nucleotide sequences (linkers) onto the DNA termini; these ligated linkers can contain specific chemically synthesized oligonucleotides encoding restriction endonuclease recognition sequences. In an alternative method, the cleaved vector and protein gene can be modified by homopolymeric tailing. Recombinant molecules can be introduced into host cells via, for example, transformation, transfection, infection, electroporation and sonoporation, so that many copies of the gene sequence are generated.

[0289] In specific embodiments, transformation of host cells with recombinant DNA molecules that incorporate the isolated protein gene, cDNA, or synthesized DNA sequence enables generation of multiple copies of the gene. Thus, the gene can be obtained in large quantities by growing transformants, isolating the recombinant DNA molecules from the transformants and, when necessary, retrieving the inserted gene from the isolated recombinant DNA.

[0290] 1. Vectors and Cells

[0291] For recombinant expression of one or more of the desired proteins, such as any hyaluronan-degrading enzyme polypeptide described herein, the nucleic acid containing all or a portion of the nucleotide sequence encoding the protein can be inserted into an appropriate expression vector, i.e. a vector that contains the necessary elements for the transcription and translation of the inserted protein coding sequence. The necessary transcriptional and translational signals also can be supplied by the native promoter for enzyme genes, and/or their flanking regions.

[0292] Also provided are vectors that contain a nucleic acid encoding the enzyme. Cells containing the vectors also are provided. The cells include eukaryotic and prokaryotic cells, and the vectors are any suitable for use therein.

[0293] Prokaryotic and eukaryotic cells, including endothelial cells, containing the vectors are provided. Such cells include bacterial cells, yeast cells, fungal cells, Archea, plant cells, insect cells and animal cells. The cells are used to produce a protein thereof by growing the above-described cells under conditions whereby the encoded protein is expressed by the cell, and recovering the expressed protein. For purposes herein, for example, the enzyme can be secreted into the medium.

[0294] Provided are vectors that contain a sequence of nucleotides that encodes the hyaluronan-degrading enzyme polypeptide, in some examples a soluble hyaluronidase polypeptide, coupled to the native or heterologous signal sequence, as well as multiple copies thereof. The vectors can be selected for expression of the enzyme protein in the cell or such that the enzyme protein is expressed as a secreted protein.

[0295] A variety of host-vector systems can be used to express the protein coding sequence. These include but are not limited to mammalian cell systems infected with virus (e.g. vaccinia virus, adenovirus and other viruses); insect cell systems infected with virus (e.g. baculovirus); microorganisms such as yeast containing yeast vectors; or bacteria transformed with bacteriophage, DNA, plasmid DNA, or cosmid DNA. The expression elements of vectors vary in their strengths and specificities. Depending on the host-vector system used, any one of a number of suitable transcription and translation elements can be used.

[0296] Any methods known to those of skill in the art for the insertion of DNA fragments into a vector can be used to construct expression vectors containing a chimeric gene containing appropriate transcriptional/translational control signals and protein coding sequences. These methods can include in vitro recombinant DNA and synthetic techniques and in vivo recombinants (genetic recombination). Expression of nucleic acid sequences encoding protein, or domains, derivatives, fragments or homologs thereof, can be regulated by a second nucleic acid sequence so that the genes or fragments thereof are expressed in a host transformed with the recombinant DNA molecule(s). For example, expression of the proteins can be controlled by any promoter/enhancer known in the art. In a specific embodiment, the promoter is not native to the genes for a desired protein. Promoters which can be used include, but are not limited to, the SV40 early promoter (Bernoist and Chambon (1981) Nature 290:304-310), the promoter contained in the 3′ long terminal repeat of Rous sarcoma virus (Yamamoto et al. (1980) Cell 22:787-797), the herpes thymidine kinase promoter (Wagner et al. (1981) Proc. Natl. Acad. Sci. U.S.A. 78:1441-1445), the regulatory sequences of the metallothionein gene (Brinster et al. (19982) Nature 296:39-42); prokaryotic expression vectors such as the β-lactamase promoter (Jay et al. (1981) Proc. Natl. Acad. Sci. U.S.A. 78:5543) or the tac promoter (DeBoer et al. (1983) Proc. Natl. Acad. Sci. U.S.A. 80:21-25; see also, “Useful Proteins from Recombinant Bacteria” in Sci. Am. (1980) 242:79-94); plant expression vectors containing the nopaline synthetase promoter (Herrara-Estrella et al. (1984) Nature 303:209-213) or the cauliflower mosaic virus 35S RNA promoter (Gardner et al. (1981) Nucleic Acids Res. 9:2871), and the promoter of the photosynthetic enzyme ribulose bisphosphate carboxylase (Herrera-Estrella et al. (1984) Nature 310:115-120); promoter elements from yeast and other fungi such as the Gal4 promoter, the alcohol dehydrogenase promoter, the phosphoglycerol kinase promoter, the alkaline phosphatase promoter, and the following animal transcriptional control regions that exhibit tissue specificity and have been used in transgenic animals: elastase 1 gene control region which is active in pancreatic acinar cells (Swift et al. (1984) Cell 38:639-646; Ornitz et al. (1986) Cold Spring Harbor Symp. Quant. Biol. 50:399-409; MacDonald (1987) Hepatology 7:425-515); insulin gene control region which is active in pancreatic beta cells (Hanahan et al. (1985) Nature 315:115-122), immunoglobulin gene control region which is active in lymphoid cells (Grosschedl et al. (1984) Cell 38:647-658; Adams et al. (1985) Nature 318:533-538; Alexander et al. (1987) Mol. Cell. Biol. 7:1436-1444), mouse mammary tumor virus control region which is active in testicular, breast, lymphoid and mast cells (Leder et al. (1986) Cell 45:485-495), albumin gene control region which is active in liver (Pinkert et al. (1987) Genes Dev. 1:268-276), alpha-fetoprotein gene control region which is active in liver (Krumlauf et al. (1985) Mol. Cell. Biol. 5:1639-1648; Hammer et al. (1987) Science 235:53-58), alpha-1 antitrypsin gene control region which is active in liver (Kelsey et al. (1987) Genes Dev. 1:161-171), beta globin gene control region which is active in myeloid cells (Magram et al. (1985) Nature 315:338-340; Kollias et al. (1986) Cell 46:89-94), myelin basic protein gene control region which is active in oligodendrocyte cells of the brain (Readhead et al. (1987) Cell 48:703-712), myosin light chain-2 gene control region which is active in skeletal muscle (Shani (1985) Nature 314:283-286), and gonadotrophic releasing hormone gene control region which is active in gonadotrophs of the hypothalamus (Mason et al. (1986) Science 234:1372-1378).

[0297] In a specific embodiment, a vector is used that contains a promoter operably linked to nucleic acids encoding a desired protein, or a domain, fragment, derivative or homolog, thereof, one or more origins of replication, and optionally, one or more selectable markers (e.g. an antibiotic resistance gene). Exemplary plasmid vectors for transformation of E. coli cells, include, for example, the pQE expression vectors (available from Qiagen, Valencia, Calif.; see also literature published by Qiagen describing the system). pQE vectors have a phage T5 promoter (recognized by E. coli RNA polymerase) and a double lac operator repression module to provide tightly regulated, high-level expression of recombinant proteins in E. coli, a synthetic ribosomal binding site (RBS II) for efficient translation, a 6×His tag coding sequence, t₀ and T1 transcriptional terminators, ColE1 origin of replication, and a beta-lactamase gene for conferring ampicillin resistance. The pQE vectors enable placement of a 6×His tag at either the N- or C-terminus of the recombinant protein. Such plasmids include pQE 32, pQE 30, and pQE 31 which provide multiple cloning sites for all three reading frames and provide for the expression of N-terminally 6×His-tagged proteins. Other exemplary plasmid vectors for transformation of E. coli cells, include, for example, the pET expression vectors (see, U.S. Pat. No. 4,952,496; available from Novagen, Madison, Wis.; see also, literature published by Novagen describing the system). Such plasmids include pET 11a, which contains the T7lac promoter, T7 terminator, the inducible E. coli lac operator, and the lac repressor gene; pET 12a-c, which contains the T7 promoter, T7 terminator, and the E. coli ompT secretion signal; and pET 15b and pET19b (Novagen, Madison, Wis.), which contain a His-Tag™ leader sequence for use in purification with a His column and a thrombin cleavage site that permits cleavage following purification over the column, the T7-lac promoter region and the T7 terminator.

[0298] Exemplary of a vector for mammalian cell expression is the HZ24 expression vector. The HZ24 expression vector was derived from the pCI vector backbone (Promega). It contains DNA encoding the Beta-lactamase resistance gene (AmpR), an F1 origin of replication, a Cytomegalovirus immediate-early enhancer/promoter region (CMV), and an SV40 late polyadenylation signal (SV40). The expression vector also has an internal ribosome entry site (IRES) from the ECMV virus (Clontech) and the mouse dihydrofolate reductase (DHFR) gene.

[0299] 2. Expression

[0300] Hyaluronan-degrading enzyme polypeptides, including soluble hyaluronidase polypeptides, can be produced by any method known to those of skill in the art including in vivo and in vitro methods. Desired proteins can be expressed in any organism suitable to produce the required amounts and forms of the proteins, such as for example, needed for administration and treatment. Expression hosts include prokaryotic and eukaryotic organisms such as E. coli, yeast, plants, insect cells, mammalian cells, including human cell lines and transgenic animals. Expression hosts can differ in their protein production levels as well as the types of post-translational modifications that are present on the expressed proteins. The choice of expression host can be made based on these and other factors, such as regulatory and safety considerations, production costs and the need and methods for purification.

[0301] Many expression vectors are available and known to those of skill in the art and can be used for expression of proteins. The choice of expression vector will be influenced by the choice of host expression system. In general, expression vectors can include transcriptional promoters and optionally enhancers, translational signals, and transcriptional and translational termination signals. Expression vectors that are used for stable transformation typically have a selectable marker which allows selection and maintenance of the transformed cells. In some cases, an origin of replication can be used to amplify the copy number of the vector.

[0302] Hyaluronan-degrading enzyme polypeptides, such as soluble hyaluronidase polypeptides, also can be utilized or expressed as protein fusions. For example, an enzyme fusion can be generated to add additional functionality to an enzyme. Examples of enzyme fusion proteins include, but are not limited to, fusions of a signal sequence, a tag such as for localization, e.g. a his₆ tag or a myc tag, or a tag for purification, for example, a GST fusion, and a sequence for directing protein secretion and/or membrane association.

[0303] a. Prokaryotic Cells

[0304] Prokaryotes, especially E. coli, provide a system for producing large amounts of proteins. Transformation of E. coli is a simple and rapid technique well known to those of skill in the art. Expression vectors for E. coli can contain inducible promoters, such promoters are useful for inducing high levels of protein expression and for expressing proteins that exhibit some toxicity to the host cells. Examples of inducible promoters include the lac promoter, the trp promoter, the hybrid tac promoter, the T7 and SP6 RNA promoters and the temperature regulated XPL promoter.

[0305] Proteins, such as any provided herein, can be expressed in the cytoplasmic environment of E. coli. The cytoplasm is a reducing environment and for some molecules, this can result in the formation of insoluble inclusion bodies. Reducing agents such as dithiothreitol and β-mercaptoethanol and denaturants, such as guanidine-HCl and urea can be used to resolubilize the proteins. An alternative approach is the expression of proteins in the periplasmic space of bacteria which provides an oxidizing environment and chaperonin-like and disulfide isomerases and can lead to the production of soluble protein. Typically, a leader sequence is fused to the protein to be expressed which directs the protein to the periplasm. The leader is then removed by signal peptidases inside the periplasm. Examples of periplasmic-targeting leader sequences include the pelB leader from the pectate lyase gene and the leader derived from the alkaline phosphatase gene. In some cases, periplasmic expression allows leakage of the expressed protein into the culture medium. The secretion of proteins allows quick and simple purification from the culture supernatant. Proteins that are not secreted can be obtained from the periplasm by osmotic lysis. Similar to cytoplasmic expression, in some cases proteins can become insoluble and denaturants and reducing agents can be used to facilitate solubilization and refolding. Temperature of induction and growth also can influence expression levels and solubility, typically temperatures between 25° C. and 37° C. are used. Typically, bacteria produce aglycosylated proteins. Thus, if proteins require glycosylation for function, glycosylation can be added in vitro after purification from host cells.

[0306] b. Yeast Cells

[0307] Yeasts such as Saccharomyces cerevisae, Schizosaccharomyces pombe, Yarrowia lipolytica. Kluyveromyces laths and Pichia pastoris are well known yeast expression hosts that can be used for production of proteins, such as any described herein. Yeast can be transformed with episomal replicating vectors or by stable chromosomal integration by homologous recombination. Typically, inducible promoters are used to regulate gene expression. Examples of such promoters include GAL1, GAL7 and GALS and metallothionein promoters, such as CUP 1, AOX 1 or other Pichia or other yeast promoter. Expression vectors often include a selectable marker such as LEU2, TRP1, HIS3 and URA3 for selection and maintenance of the transformed DNA. Proteins expressed in yeast are often soluble. Co-expression with chaperonins such as Bip and protein disulfide isomerase can improve expression levels and solubility. Additionally, proteins expressed in yeast can be directed for secretion using secretion signal peptide fusions such as the yeast mating type alpha-factor secretion signal from Saccharomyces cerevisae and fusions with yeast cell surface proteins such as the Aga2p mating adhesion receptor or the Arxula adeninivorans glucoamylase. A protease cleavage site such as for the Kex-2 protease, can be engineered to remove the fused sequences from the expressed polypeptides as they exit the secretion pathway. Yeast also is capable of glycosylation at Asn-X-Ser/Thr motifs.

[0308] c. Insect Cells

[0309] Insect cells, particularly using baculovirus expression, are useful for expressing polypeptides such as hyaluronidase polypeptides. Insect cells express high levels of protein and are capable of most of the post-translational modifications used by higher eukaryotes. Baculovirus have a restrictive host range which improves the safety and reduces regulatory concerns of eukaryotic expression. Typical expression vectors use a promoter for high level expression such as the polyhedrin promoter of baculovirus. Commonly used baculovirus systems include the baculoviruses such as Autographa califormica nuclear polyhedrosis virus (AcNPV), and the Bombyx mori nuclear polyhedrosis virus (BmNPV) and an insect cell line such as Sf9 derived from Spodoptera frupperda, Pseudaletia unipuncta (A7S) and Danaus plexippus (DpN1). For high-level expression, the nucleotide sequence of the molecule to be expressed is fused immediately downstream of the polyhedrin initiation codon of the virus. Mammalian secretion signals are accurately processed in insect cells and can be used to secrete the expressed protein into the culture medium. In addition, the cell lines Pseudaletia unipuncta (A7S) and Danaus plexippus (DpN1) produce proteins with glycosylation patterns similar to mammalian cell systems.

[0310] An alternative expression system in insect cells is the use of stably transformed cells. Cell lines such as the Schneider 2 (S2) and Kc cells (Drosophila melanogaster) and C7 cells (Aedes albopictus) can be used for expression. The Drosophila metallothionein promoter can be used to induce high levels of expression in the presence of heavy metal induction with cadmium or copper. Expression vectors are typically maintained by the use of selectable markers such as neomycin and hygromycin.

[0311] d. Mammalian Cells

[0312] Mammalian expression systems can be used to express proteins including hyaluronan-degrading enzyme polypeptides, such as soluble hyaluronidase polypeptides. Expression constructs can be transferred to mammalian cells by viral infection such as adenovirus or by direct DNA transfer such as liposomes, calcium phosphate, DEAE-dextran and by physical means such as electroporation and microinjection. Expression vectors for mammalian cells typically include an mRNA cap site, a TATA box, a translational initiation sequence (Kozak consensus sequence) and polyadenylation elements. IRES elements also can be added to permit bicistronic expression with another gene, such as a selectable marker. Such vectors often include transcriptional promoter-enhancers for high-level expression, for example the SV40 promoter-enhancer, the human cytomegalovirus (CMV) promoter and the long terminal repeat of Rous sarcoma virus (RSV). These promoter-enhancers are active in many cell types. Tissue and cell-type promoters and enhancer regions also can be used for expression. Exemplary promoter/enhancer regions include, but are not limited to, those from genes such as elastase I, insulin, immunoglobulin, mouse mammary tumor virus, albumin, alpha fetoprotein, alpha I antitrypsin, beta globin, myelin basic protein, myosin light chain 2, and gonadotropic releasing hormone gene control. Selectable markers can be used to select for and maintain cells with the expression construct. Examples of selectable marker genes include, but are not limited to, hygromycin B phosphotransferase, adenosine deaminase, xanthine-guanine phosphoribosyl transferase, aminoglycoside phosphotransferase, dihydrofolate reductase (DHFR) and thymidine kinase. For example, expression can be performed in the presence of methotrexate to select for only those cells expressing the DHFR gene. Fusion with cell surface signaling molecules such as TCR-ζ and Fc_{ε}RI-γ can direct expression of the proteins in an active state on the cell surface.

[0313] Many cell lines are available for mammalian expression including mouse, rat human, monkey, chicken and hamster cells. Exemplary cell lines include but are not limited to CHO, Balb/3T3, HeLa, MT2, mouse NSO (nonsecreting) and other myeloma cell lines, hybridoma and heterohybridoma cell lines, lymphocytes, fibroblasts, Sp2/0, COS, NIH3T3, HEK293, 293S, 2B8, and HKB cells. Cell lines also are available adapted to serum-free media which facilitates purification of secreted proteins from the cell culture media. Examples include CHO-S cells (Invitrogen, Carlsbad, Calif., cat #11619-012) and the serum free EBNA-1 cell line (Pham et al. (2003) Biotechnol. Bioeng. 84:332-342). Cell lines also are available that are adapted to grow in special media optimized for maximal expression. For example, DG44 CHO cells are adapted to grow in suspension culture in a chemically defined, animal product-free medium.

[0314] e. Plants

[0315] Transgenic plant cells and plants can be used to express proteins such as any described herein. Expression constructs are typically transferred to plants using direct DNA transfer such as microprojectile bombardment and PEG-mediated transfer into protoplasts, and with agrobacterium-mediated transformation. Expression vectors can include promoter and enhancer sequences, transcriptional termination elements and translational control elements. Expression vectors and transformation techniques are usually divided between dicot hosts, such as Arabidopsis and tobacco, and monocot hosts, such as corn and rice. Examples of plant promoters used for expression include the cauliflower mosaic virus promoter, the nopaline synthetase promoter, the ribose bisphosphate carboxylase promoter and the ubiquitin and UBQ3 promoters. Selectable markers such as hygromycin, phosphomannose isomerase and neomycin phosphotransferase are often used to facilitate selection and maintenance of transformed cells. Transformed plant cells can be maintained in culture as cells, aggregates (callus tissue) or regenerated into whole plants. Transgenic plant cells also can include algae engineered to produce hyaluronidase polypeptides. Because plants have different glycosylation patterns than mammalian cells, this can influence the choice of protein produced in these hosts.

[0316] 3. Purification Techniques

[0317] Method for purification of polypeptides, including hyaluronan-degrading enzyme polypeptides (e.g. soluble hyaluronidase polypeptides) or other proteins, from host cells will depend on the chosen host cells and expression systems. For secreted molecules, proteins are generally purified from the culture media after removing the cells. For intracellular expression, cells can be lysed and the proteins purified from the extract. When transgenic organisms such as transgenic plants and animals are used for expression, tissues or organs can be used as starting material to make a lysed cell extract. Additionally, transgenic animal production can include the production of polypeptides in milk or eggs, which can be collected, and if necessary, the proteins can be extracted and further purified using standard methods in the art.

[0318] Proteins, such as soluble hyaluronidase polypeptides, can be purified using standard protein purification techniques known in the art including but not limited to, SDS-PAGE, size fraction and size exclusion chromatography, ammonium sulfate precipitation and ionic exchange chromatography, such as anion exchange chromatography. Affinity purification techniques also can be utilized to improve the efficiency and purity of the preparations. For example, antibodies, receptors and other molecules that bind hyaluronidase enzymes can be used in affinity purification. Expression constructs also can be engineered to add an affinity tag to a protein such as a myc epitope, GST fusion or His₆ and affinity purified with myc antibody, glutathione resin and Ni-resin, respectively. Purity can be assessed by any method known in the art including gel electrophoresis and staining and spectrophotometric techniques. Purified rHuPH20 compositions, as provided herein, typically have a specific activity of at least 70,000 to 100,000 Units/mg, for example, about 120,000 Units/mg. The specific activity can vary upon modification, such as with a polymer. For example, polymer-conjugated hyaluronan-degrading enzymes typically have a specific activity of between or between about 15,000 to 60,000 Units/mg, such as for example, 30,000 Units/mg to 50,000 Units/mg, and generally at least or about at least 40,000 Units/mg.

[0319] 4. PEGylation of Hyaluronan-Degrading Enzyme Polypeptides

[0320] Polyethylene glycol (PEG) has been widely used in biomaterials, biotechnology and medicine primarily because PEG is a biocompatible, nontoxic, water-soluble polymer that is typically nonimmunogenic (Zhao and Harris (1997) ACS Symposium Series 680:458-472). In the area of drug delivery, PEG derivatives have been widely used in covalent attachment (i.e. “PEGylation”) to proteins to reduce immunogenicity, proteolysis and kidney clearance and to enhance solubility (Zalipsky (1995) Adv. Drug Del. Rev. 16:157-182). Similarly, PEG has been attached to low molecular weight, relatively hydrophobic drugs to enhance solubility, reduce toxicity and alter biodistribution. Typically, PEGylated drugs are injected as solutions.

[0321] A closely related application is synthesis of crosslinked degradable PEG networks or formulations for use in drug delivery since much of the same chemistry used in design of degradable, soluble drug carriers can also be used in design of degradable gels (Sawhney et al. (1993) Macromolecules 26:581-587). It also is known that intermacromolecular complexes can be formed by mixing solutions of two complementary polymers. Such complexes are generally stabilized by electrostatic interactions (polyanion-polycation) and/or hydrogen bonds (polyacid-polybase) between the polymers involved, and/or by hydrophobic interactions between the polymers in an aqueous surrounding (Krupers et al. (1996) Eur. Polym. J. 32:785-790). For example, mixing solutions of polyacrylic acid (PAAc) and polyethylene oxide (PEO) under the proper conditions results in the formation of complexes based mostly on hydrogen bonding. Dissociation of these complexes at physiologic conditions has been used for delivery of free drugs (i.e. non-PEGylated). In addition, complexes of complementary polymers have been formed from both homopolymers and copolymers.

[0322] Numerous reagents for PEGylation have been described in the art. Such reagents include, but are not limited to, N-hydroxysuccinimidyl (NHS) activated PEG, succinimidyl mPEG, mPEG₂-N-hydroxysuccinimide, mPEG succinimidyl alpha-methylbutanoate, mPEG succinimidyl propionate, mPEG succinimidyl butanoate, mPEG carboxymethyl 3-hydroxybutanoic acid succinimidyl ester, homobi functional PEG-succinimidyl propionate, homobi functional PEG propionaldehyde, homobi functional PEG butyraldehyde, PEG maleimide, PEG hydrazide, p-nitrophenyl-carbonate PEG, mPEG-benzotriazole carbonate, propionaldehyde PEG, mPEG butryaldehyde, branched mPEG₂ butyraldehyde, mPEG acetyl, mPEG piperidone, mPEG methylketone, mPEG “linkerless” maleimide, mPEG vinyl sulfone, mPEG thiol, mPEG orthopyridylthioester, mPEG orthopyridyl disulfide, Fmoc-PEG-NHS, Boc-PEG-NHS, vinylsulfone PEG-NHS, acrylate PEG-NHS, fluorescein PEG-NHS, and biotin PEG-NHS (see, e.g. Monfardini et al. (1995) Bioconj. Chem. 6:62-69; Veronese et al. (1997) J. Bioactive Compatible Polymers 12:197-207; U.S. Pat. No. 5,672,662; U.S. Pat. No. 5,932,462; U.S. Pat. No. 6,495,659; U.S. Pat. No. 6,737,505; U.S. Pat. No. 4,002,531; U.S. Pat. No. 4,179,337; U.S. Pat. No. 5,122,614; U.S. Pat. No. 5,324,844; U.S. Pat. No. 5,446,090; U.S. Pat. No. 5,612,460; U.S. Pat. No. 5,643,575; U.S. Pat. No. 5,766,581; U.S. Pat. No. 5,795,569; U.S. Pat. No. 5,808,096; U.S. Pat. No. 5,900,461; U.S. Pat. No. 5,919,455; U.S. Pat. No. 5,985,263; U.S. Pat. No. 5,990,237; U.S. Pat. No. 6,113,906; U.S. Pat. No. 6,214,966; U.S. Pat. No. 6,258,351; U.S. Pat. No. 6,340,742; U.S. Pat. No. 6,413,507; U.S. Pat. No. 6,420,339; U.S. Pat. No. 6,437,025; U.S. Pat. No. 6,448,369; U.S. Pat. No. 6,461,802; U.S. Pat. No. 6,828,401; U.S. Pat. No. 6,858,736; U.S. 2001/0021763; U.S. 2001/0044526; U.S. 2001/0046481; U.S. 2002/0052430; U.S. 2002/0072573; U.S. 2002/0156047; U.S. 2003/0114647; U.S. 2003/0143596; U.S. 2003/0158333; U.S. 2003/0220447; U.S. 2004/0013637; US 2004/0235734; WO0500360; U.S. 2005/0114037; U.S. 2005/0171328; U.S. 2005/0209416; EP 1064951; EP 0822199; WO 01076640; WO 0002017; WO 0249673; WO 9428024; and WO 0187925).

[0323] In one example, the polyethylene glycol has a molecular weight ranging from about 3 kD to about 50 kD, and typically from about 5 kD to about 30 kD. Covalent attachment of the PEG to the drug (known as “PEGylation”) can be accomplished by known chemical synthesis techniques. For example, the PEGylation of protein can be accomplished by reacting NHS-activated PEG with the protein under suitable reaction conditions.

[0324] While numerous reactions have been described for PEGylation, those that are most generally applicable confer directionality, utilize mild reaction conditions, and do not necessitate extensive downstream processing to remove toxic catalysts or bi-products. For instance, monomethoxy PEG (mPEG) has only one reactive terminal hydroxyl, and thus its use limits some of the heterogeneity of the resulting PEG-protein product mixture. Activation of the hydroxyl group at the end of the polymer opposite to the terminal methoxy group is generally necessary to accomplish efficient protein PEGylation, with the aim being to make the derivatised PEG more susceptible to nucleophilic attack. The attacking nucleophile is usually the epsilon-amino group of a lysyl residue, but other amines also can react (e.g. the N-terminal alpha-amine or the ring amines of histidine) if local conditions are favorable. A more directed attachment is possible in proteins containing a single lysine or cysteine. The latter residue can be targeted by PEG-maleimide for thiol-specific modification. Alternatively, PEG hydrazide can be reacted with a periodate oxidized hyaluronan-degrading enzyme and reduced in the presence of NaCNBH₃. More specifically, PEGylated CMP sugars can be reacted with a hyaluronan-degrading enzyme in the presence of appropriate glycosyl-transferases. One technique is the “PEGylation” technique where a number of polymeric molecules are coupled to the polypeptide in question. When using this technique the immune system has difficulties in recognizing the epitopes on the polypeptide's surface responsible for the formation of antibodies, thereby reducing the immune response. For polypeptides introduced directly into the circulatory system of the human body to give a particular physiological effect (i.e. pharmaceuticals) the typical potential immune response is an IgG and/or IgM response, while polypeptides which are inhaled through the respiratory system (i.e. industrial polypeptide) potentially can cause an IgE response (i.e. allergic response). One of the theories explaining the reduced immune response is that the polymeric molecule(s) shield(s) epitope(s) on the surface of the polypeptide responsible for the immune response leading to antibody formation. Another theory or at least a partial factor is that the heavier the conjugate is, the more reduced immune response is obtained.

[0325] Typically, to make the PEGylated hyaluronan-degrading enzymes provided herein, including the PEGylated hyaluronidases, PEG moieties are conjugated, via covalent attachment, to the polypeptides. Techniques for PEGylation include, but are not limited to, specialized linkers and coupling chemistries (see, e.g. Roberts et al. (2002) Adv. Drug Deliv. Rev. 54:459-476), attachment of multiple PEG moieties to a single conjugation site (such as via use of branched PEGs; see, e.g. Guiotto et al. (2002) Bioorg. Med. Chem. Lett. 12:177-180), site-specific PEGylation and/or mono-PEGylation (see, e.g. Chapman et al. (1999) Nature Biotech. 17:780-783), and site-directed enzymatic PEGylation (see, e.g. Sato (2002) Adv. Drug Deliv. Rev. 54:487-504). Methods and techniques described in the art can produce proteins having 1, 2, 3, 4, 5, 6, 7, 8, 9, 10 or more than 10 PEG or PEG derivatives attached to a single protein molecule (see, e.g. U.S. Pub. No. 2006/0104968).

[0326] As an exemplary illustration of the PEGylation of an illustrative method for making PEGylated hyaluronan-degrading enzymes, such as PEGylated hyaluronidases, PEG aldehydes, succinimides and carbonates have each been applied to conjugate PEG moieties, typically succinimidyl PEGs, to rHuPH20. For example, rHuPH20 has been conjugated with exemplary succinimidyl monoPEG (mPEG) reagents including mPEG-Succinimidyl Propionates (mPEG-SPA), mPEG-Succinimidyl Butanoates (mPEG-SBA), and (for attaching “branched” PEGs) mPEG2-N-Hydroxylsuccinimide. These PEGylated succinimidyl esters contain different length carbon backbones between the PEG group and the activated cross-linker, and either a single or branched PEG group. These differences can be used, for example, to provide for different reaction kinetics and to potentially restrict sites available for PEG attachment to rHuPH20 during the conjugation process.

[0327] Succinimidyl PEGs (as above) containing either linear or branched PEGs can be conjugated to rHuPH20. PEGs can used to generate rHuPH20s reproducibly containing molecules having, on the average, between about three to six or three to six PEG molecules per hyaluronidase. Such PEGylated rHuPH20 compositions can be readily purified to yield compositions having specific activities of approximately 25,000 or 30,000 Unit/mg protein hyaluronidase activity, and being substantially free of non-PEGylated rHuPH20 (less than 5% non-PEGylated).

[0328] Using various PEG reagents, exemplary versions of hyaluronan-degrading enzymes, in particular soluble human recombinant hyaluronidases (e.g. rHuPH20), can be prepared, for example, using mPEG-SBA (30 kD), mPEG-SMB (30 kD), and branched versions based on mPEG2-NHS (40 kD) and mPEG2-NHS (60 kD). PEGylated versions of rHuPH20 have been generated using NHS chemistries, as well as carbonates, and aldehydes, using each of the following reagents: mPEG2-NHS-40K branched, mPEG-NHS-10K branched, mPEG-NHS-20K branched, mPEG2-NHS-60K branched; mPEG-SBA-5K, mPEG-SBA-20K, mPEG-SBA-30K; mPEG-SMB-20K, mPEG-SMB-30K; mPEG-butyrldehyde; mPEG-SPA-20K, mPEG-SPA-30K; and PEG-NHS-5K-biotin. PEGylated hyaluronidases have also been prepared using PEG reagents available from Dowpharma, a division of Dow Chemical Corporation: including hyaluronidases PEGylated with Dowpharma's p-nitrophenyl-carbonate PEG (30 kDa) and with propionaldehyde PEG (30 kDa).

[0329] In one example, the PEGylation includes conjugation of mPEG-SBA, for example, mPEG-SBA-30K (having a molecular weight of about 30 kDa) or another succinimidyl esters of PEG butanoic acid derivative, to a soluble hyaluronidase. Succinimidyl esters of PEG butanoic acid derivatives, such as mPEG-SBA-30K readily couple to amino groups of proteins. For example, covalent conjugation of m-PEG-SBA-30K and rHuPH20 (which is approximately 60 KDa in size) provides stable amide bonds between rHuPH20 and mPEG, as shown in Scheme 1, below.

[chemical structure]

[0330] Typically, the mPEG-SBA-30K or other PEG is added to the hyaluronan-degrading enzyme, in some instances a hyaluronidase, at a PEG:polypeptide molar ratio of 10:1 in a suitable buffer, e.g. 130 mM NaCl/10 mM HEPES at pH 6.8 or 70 mM phosphate buffer, pH 7, followed by sterilization, e.g. sterile filtration, and continued conjugation, for example, with stirring, overnight at 4° C. in a cold room. In one example, the conjugated PEG-hyaluronan-degrading enzyme is concentrated and buffer-exchanged.

[0331] Other methods of coupling succinimidyl esters of PEG butanoic acid derivatives, such as mPEG-SBA-30K are known in the art (see, e.g. U.S. Pat. No. 5,672,662; U.S. Pat. No. 6,737,505; and U.S. Pub. No. 2004/0235734). For example, a polypeptide, such as a hyaluronan-degrading enzyme (e.g. a hyaluronidase), can be coupled to an NHS activated PEG derivative by reaction in a borate buffer (0.1 M, pH 8.0) for one hour at 4° C. The resulting PEGylated protein can be purified by ultrafiltration. Alternatively, PEGylation of a bovine alkaline phosphatase can be accomplished by mixing the phosphatase with mPEG-SBA in a buffer containing 0.2 M sodium phosphate and 0.5 M NaCl (pH 7.5) at 4° C. for 30 minutes. Unreacted PEG can be removed by ultrafiltration. Another method reacts polypeptide with mPEG-SBA in deionized water to which triethylamine is added to raise the pH to 7.2-9. The resulting mixture is stirred at room temperature for several hours to complete the PEGylation.

[0332] Methods for PEGylation of hyaluronan-degrading polypeptides, including, for example, animal-derived hyaluronidases and bacterial hyaluronan-degrading enzymes, are known to one of skill in the art. See, for example, European Patent No. EP 0400472, which describes the PEGylation of bovine testes hyaluorindase and chondroitin ABC lyase. Also, U.S. Publication No. 2006/014968 describes PEGylation of a human hyaluronidase derived from human PH20. For example, the PEGylated hyakironan-degrading enzyme generally contains at least 3 PEG moieties per molecule. For example, the hyaluronan-degrading enzyme can have a PEG to protein molar ratio between 5:1 and 9:1, for example, 7:1.

### E. PHARMACEUTICAL COMPOSITIONS AND FORMULATIONS

[0333] Provided herein are compositions of a polymer-conjugated hyaluronan-degrading enzyme. Such compositions can be used in the methods herein to reduce or ameliorate insulin resistance or to prevent or ameliorate a disease or condition associated with insulin resistance. The composition can be formulated for parenteral delivery (i.e. for systemic delivery). For example, the compositions provided herein are formulated for subcutaneous delivery or for intravenous delivery. The compositions can be formulated for single dosage administration or for multiple dosage administration. The composition can be formulated for direct administration. The compositions can be provided as a liquid or lyophilized formulation. Where the compositions are provided in lyophilized form they can be reconstituted just prior to use by an appropriate buffer, for example, a sterile saline solution.

[0334] The compounds can be formulated into suitable pharmaceutical preparations such as solutions, suspensions, tablets, dispersible tablets, pills, capsules, powders, sustained release formulations or elixirs, for oral administrate, as well as transdermal patch preparation and dry powder inhalers. Typically, the compounds are formulated into pharmaceutical compositions using techniques and procedures well known in the art (see e.g. Ansel Introduction to Pharmaceutical Dosage Forms, Fourth Edition, 1985, 126). Generally, the mode of formulation is a function of the route of administration.

[0335] Compositions can be formulated for administration by any route known to those of skill in the art including intramuscular, intravenous, intradermal, intralesional, intraperitoneal injection, subcutaneous, intratumoral, epidural, nasal, oral, vaginal, rectal, topical, local, otic, inhalational, buccal (e.g. sublingual), and transdermal administration or any route. Other modes of administration also are contemplated. Administration can be local, topical or systemic depending upon the locus of treatment. Local administration to an area in need of treatment can be achieved by, for example, but not limited to, local infusion during surgery, topical application, e.g. in conjunction with a wound dressing after surgery, by injection, by means of a catheter, by means of a suppository, or by means of an implant.

[0336] Compositions also can be administered with other biologically active agents, either sequentially, intermittently or in the same composition. Administration also can include controlled release systems including controlled release formulations and device controlled release, such as by means of a pump.

[0337] The most suitable route in any given case depends on a variety of factors, such as the nature of the disease, the progress of the disease, the severity of the disease the particular composition which is used. For purposes herein, it is desired that a polymer-conjugated hyaluronan-degrading enzyme, such as a soluble hyaluronidase is administered such that a pharmaceutically available amount or level exists in the plasma. For example, compostions are administered sytemically, for example, via intravenous administration. Subutaneous methods also can be employed, although increased absorption times can be necessary to ensure equivalent bioavailability compared to intravenous methods. Pharmaceutical compositions can be formulated in dosage forms appropriate for each route of administration.

[0338] Administration methods can be employed to decrease the exposure of hyaluronan-degrading enzymes, e.g. soluble hyaluronidases, and other molecules to degradative processes, such as proteolytic degradation and immunological intervention via antigenic and immunogenic responses. Examples of such methods include local administration at the site of treatment.

[0339] 1. Formulations

[0340] Pharmaceutically acceptable compositions are prepared in view of approvals for a regulatory agency or other agency prepared in accordance with generally recognized pharmacopeia for use in animals and in humans. Compositions can take the form of solutions, suspensions, emulsion, tablets, pills, capsules, powders, and sustained release formulations. A composition can be formulated as a suppository, with traditional binders and carriers such as triglycerides. Oral formulation can include standard carriers such as pharmaceutical grades of mannitol, lactose, starch, magnesium stearate, sodium saccharine, cellulose, magnesium carbonate, and other such agents. The formulation should suit the mode of administration.

[0341] Pharmaceutical compositions can include carriers such as a diluent, adjuvant, excipient, or vehicle with which an enzyme or activator is administered. Examples of suitable pharmaceutical carriers are described in “Remington's Pharmaceutical Sciences” by E. W. Martin. Such compositions will contain a therapeutically effective amount of the compound, generally in purified form, together with a suitable amount of carrier so as to provide the form for proper administration to the patient. Such pharmaceutical carriers can be sterile liquids, such as water and oils, including those of petroleum, animal, vegetable or synthetic origin, such as peanut oil, soybean oil, mineral oil, and sesame oil. Water is a typical carrier when the pharmaceutical composition is administered intravenously. Saline solutions and aqueous dextrose and glycerol solutions also can be employed as liquid carriers, particularly for injectable solutions. Compositions can contain along with an active ingredient: a diluent such as lactose, sucrose, dicalcium phosphate, or carboxymethylcellulose; a lubricant, such as magnesium stearate, calcium stearate and talc; and a binder such as starch, natural gums, such as gum acaciagelatin, glucose, molasses, polyinylpyrrolidine, celluloses and derivatives thereof, povidone, crospovidones and other such binders known to those of skill in the art. Suitable pharmaceutical excipients include starch, glucose, lactose, sucrose, gelatin, malt, rice, flour, chalk, silica gel, sodium stearate, glycerol monostearate, talc, sodium chloride, dried skim milk, glycerol, propylene, glycol, water, and ethanol. A composition, if desired, also can contain minor amounts of wetting or emulsifying agents, or pH buffering agents, for example, acetate, sodium citrate, cyclodextrine derivatives, sorbitan monolaurate, triethanolamine sodium acetate, triethanolamine oleate, and other such agents.

[0342] In one example, pharmaceutical preparation can be in liquid form, for example, solutions, syrups or suspensions. Such liquid preparations can be prepared by conventional means with pharmaceutically acceptable additives such as suspending agents (e.g. sorbitol syrup, cellulose derivatives or hydrogenated edible fats); emulsifying agents (e.g. lecithin or acacia); non-aqueous vehicles (e.g. almond oil, oily esters, or fractionated vegetable oils); and preservatives (e.g. methyl or propyl-p-hydroxybenzoates or sorbic acid). In another example, pharmaceutical preparations can be presented in lyophilized form for reconstitution with water or other suitable vehicle before use.

[0343] Pharmaceutically therapeutically active compounds and derivatives thereof are typically formulated and administered in unit dosage forms or multiple dosage forms. Each unit dose contains a predetermined quantity of therapeutically active compound sufficient to produce the desired therapeutic effect, in association with the required pharmaceutical carrier, vehicle or diluent. Unit dosage forms, include, but are not limited to, tablets, capsules, pills, powders, granules, sterile parenteral solutions or suspensions, and oral solutions or suspensions, and oil water emulsions containing suitable quantities of the compounds or pharmaceutically acceptable derivatives thereof. Unit dose forms can be contained ampoules and syringes or individually packaged tablets or capsules. Unit dose forms can be administered in fractions or multiples thereof. A multiple dose form is a plurality of identical unit dosage forms packaged in a single container to be administered in segregated unit dose form. Examples of multiple dose forms include vials, bottles of tablets or capsules or bottles of pints or gallons. Hence, multiple dose form is a multiple of unit doses that are not segregated in packaging. Generally, dosage forms or compositions containing active ingredient in the range of 0.005% to 100% with the balance made up from non-toxic carrier can be prepared.

[0344] Pharmaceutical composition can be formulated in dosage forms appropriate for each route of administration.

[0345] a. Injectables, Solutions and Emulsions

[0346] Parenteral administration, generally characterized by injection, either subcutaneously, intramuscularly, intratumorally, intravenously or intradermally is contemplated herein. Injectables can be prepared in conventional forms, either as liquid solutions or suspensions, solid forms suitable for solution or suspension in liquid prior to injection, or as emulsions. Suitable excipients are, for example, water, saline, dextrose, glycerol or ethanol. In addition, if desired, the pharmaceutical compositions to be administered may also contain an activator in the form of a solvent such as pH buffering agents, metal ion salts, or other such buffers. The pharmaceutical compositions also may contain other minor amounts of non-toxic auxiliary substances such as wetting or emulsifying agents, pH buffering agents, stabilizers, solubility enhancers, and other such agents, such as for example, sodium acetate, sorbitan monolaurate, triethanolamine oleate and cyclodextrins. Implantation of a slow-release or sustained-release system, such that a constant level of dosage is maintained (see, e.g. U.S. Pat. No. 3,710,795) also is contemplated herein. The percentage of active compound contained in such parenteral compositions is highly dependent on the specific nature thereof, as well as the activity of the compound and the needs of the subject.

[0347] For example, a standard stabilized formulation of a polymer-conjugated hyaluronan-degrading enzyme, such as a polymer-conjugated soluble hyaluronidase as provided herein, is formulated with one or more of EDTA, NaCl, CaCl₂ histidine, lactose, albumin, Pluronic® F68, TWEEN® and/or other detergent or other similar agents. For example, compositions provided herein can contain one or more pH buffers (such as, for example, histidine, phosphate, or other buffers), or acidic buffer (such as acetate, citrate, pyruvate, Gly-HCl, succinate, lactate, maleate or other buffers), tonicity modifier (such as, for example, an amino acid, polyalcohol, NaCl, trehalose, other salts and/or sugars), stabilizer, chelating agent, such as ethylenediaminetetraacetic acid, ethylenediaminetetraacetate or calcium EDTA, oxygen scavenger, such as methionine, ascorbic acid/ascorbate, citric acid/citrate, or albumin, and/or a preservative, such as preservative containing an aromatic ring (e.g. phenol or cresol). Exemplary stabilizers that are useful for compositions containing a hyaluronan-degrading enzyme include detergents, such as polysorbates and proteins such as human serum albumin (SEQ ID NO:211). Exemplary concentrations of serum albumin that are useful in the compositions herein include 0.1 mg/mL to 1 mg/mL, such as at least or at least about or about or 0.1 mg/mL, 0.2 mg/mL, 0.3 mg/mL, 0.4 mg/mL, 0.5 mg/mL, 0.6 mg/mL, 0.7 mg/mL, 0.8 mg/mL, 0.9 mg/mL or 1 mg/mL, but can be more or less. Polysorbates also can be present in the compositions at, for example, concentrations of or about between 0.001% to 0.1%, such as at least about or at least or about or 0.001%, 0.002%, 0.003%, 0.004%, 0.005%, 0.006%, 00.007%, 0.008%, 0.009%, 0.01%, 0.02%, 0.03%, 0.04%, 0.05%, 0.06%, 0.07%, 0.08%, 0.09% or 0.1%. A metal chelating agent, such as calcium EDTA (CaEDTA), also can be present, such as for example, at concentrations of between approximately 0.02 mM to 20 mM, such as at least about or at least or about or 0.02 mM, 0.04 mM, 0.06 mM, 0.08 mM, 0.1 mM, 0.2 mM, 0.3 mM, 0.4 mM, 0.5 mM, 0.6 mM, 0.7 mM, 0.8 mM, 0.9 mM, 1 mM, 5 mM, 10 mM, 15 mM, 20 mM or more. The pH and the osmolarity of the compositions can be adjusted by one of skill in the art to optimize the conditions for the desired activity and stability of the composition. In some examples, the compositions provided herein have an osmolarity of between 100 mOsm/kg to 500 mOsm/kg, such as at least or at least about or at or about 100 mOsm/kg, 120 mOsm/kg, 140 mOsm/kg, 160 mOsm/kg, 180 mOsm/kg, 200 mOsm/kg, 220 mOsm/kg, 240 mOsm/kg, 260 mOsm/kg, 280 mOsm/kg, 300 mOsm/kg, 320 mOsm/kg, 340 mOsm/kg, 360 mOsm/kg, 380 mOsm/kg, 400 mOsm/kg, 420 mOsm/kg, 440 mOsm/kg, 460 mOsm/kg, 500 or more mOsm/kg, and a pH of between or between about 6 to 8, such as 6 to 7.4, for example at or about 6, 6.2, 6.4, 6.6, 6.8, 7, 7.2, 7.4, 7.6, 7.8 or 8.

[0348] Generally, NaCl is provided in formulations containing a hyaluronan-degrading enzyme herein, for example, in an amount that is or is about 100 mM-150 mM or more. For example, an exemplary formulation can contain at or about 10 mM histidine and/or at or about 130 mM NaCl. Other formulations can contain in addition or alternatively lactose, for example, at or about 13 mg/ml. Additionally, an anti-bacterial or anti-fungal agent, including, but not limited to thiomersal, can be present in the formulation. Formulations can further contain Albumin, Pluronic® F68, TWEEN® and/or other detergent. The formulations are provided at a pH that is or is about 6.0 to 7.4, such as 6.0, 6.1., 6.2, 6.3, 6.4, 6.5, 6.6, 6.7, 6.8, 6.9, 7.0, 7.1, 7.2, 7.3 or 7.4, generally that is or is about pH 6.5. Concentrated formulations of hyaluronan-degrading enzyme for use herein are generally diluted in a saline solution or other salt buffered solution prior administration to maintain the appropriate salt concentration.

[0349] Injectables are designed for local and systemic administration. For purposes herein, local administration is desired for direct administration to the affected skeletal muscle associated with accumulated or excess hyaluronan. Preparations for parenteral administration include sterile solutions ready for injection, sterile dry soluble products, such as lyophilized powders, ready to be combined with a solvent just prior to use, including hypodermic tablets, sterile suspensions ready for injection, sterile dry insoluble products ready to be combined with a vehicle just prior to use and sterile emulsions. The solutions may be either aqueous or nonaqueous. If administered intravenously, suitable carriers include physiological saline or phosphate buffered saline (PBS), and solutions containing thickening and solubilizing agents, such as glucose, polyethylene glycol, and polypropylene glycol and mixtures thereof.

[0350] Pharmaceutically acceptable carriers used in parenteral preparations include aqueous vehicles, nonaqueous vehicles, antimicrobial agents, isotonic agents, buffers, antioxidants, local anesthetics, suspending and dispersing agents, emulsifying agents, sequestering or chelating agents and other pharmaceutically acceptable substances. Examples of aqueous vehicles include Sodium Chloride Injection, Ringers Injection, Isotonic Dextrose Injection, Sterile Water Injection, Dextrose and Lactated Ringers Injection. Nonaqueous parenteral vehicles include fixed oils of vegetable origin, cottonseed oil, corn oil, sesame oil and peanut oil. Antimicrobial agents in bacteriostatic or fungistatic concentrations can be added to parenteral preparations packaged in multiple-dose containers, which include phenols or cresols, mercurials, benzyl alcohol, chlorobutanol, methyl and propyl p-hydroxybenzoic acid esters, thimerosal, benzalkonium chloride and benzethonium chloride. Isotonic agents include sodium chloride and dextrose. Buffers include phosphate and citrate. Antioxidants include sodium bisulfate. Local anesthetics include procaine hydrochloride. Suspending and dispersing agents include sodium carboxymethylcelluose, hydroxypropyl methylcellulose and polyvinylpyrrolidone. Emulsifying agents include Polysorbate 80 (TWEENs 80). A sequestering or chelating agent of metal ions include EDTA. Pharmaceutical carriers also include ethyl alcohol, polyethylene glycol and propylene glycol for water miscible vehicles and sodium hydroxide, hydrochloric acid, citric acid or lactic acid for pH adjustment. If administered intravenously, suitable carriers include physiological saline or phosphate buffered saline (PBS), and solutions containing thickening and solubilizing agents, such as glucose, polyethylene glycol, and polypropylene glycol and mixtures thereof.

[0351] The concentration of the pharmaceutically active compound is adjusted so that an injection provides an effective amount to produce the desired pharmacological effect. The exact dose depends on the age, weight and condition of the patient or animal as is known in the art. The unit-dose parenteral preparations are packaged in an ampoule, a vial or a syringe with a needle. The volume of liquid solution or reconstituted powder preparation, containing the pharmaceutically active compound, is a function of the disease to be treated and the particular article of manufacture chosen for package. All preparations for parenteral administration must be sterile, as is known and practiced in the art.

[0352] b. Lyophilized Powders

[0353] Of interest herein are lyophilized powders, which can be reconstituted for administration as solutions, emulsions and other mixtures. They may also be reconstituted and formulated as solids or gels. The lyophilized powders can be prepared from any of the solutions described above.

[0354] The sterile, lyophilized powder is prepared by dissolving a compound of a soluble hyaluronidase and/or second agent in a buffer solution. The buffer solution may contain an excipient which improves the stability or other pharmacological component of the powder or reconstituted solution, prepared from the powder. Subsequent sterile filtration of the solution followed by lyophilization under standard conditions known to those of skill in the art provides the desired formulation. Briefly, the lyophilized powder is prepared by dissolving an excipient, such as dextrose, sorbital, fructose, corn syrup, xylitol, glycerin, glucose, sucrose or other suitable agent, in a suitable buffer, such as citrate, sodium or potassium phosphate or other such buffer known to those of skill in the art. Then, a selected enzyme is added to the resulting mixture, and stirred until it dissolves. The resulting mixture is sterile filtered or treated to remove particulates and to insure sterility, and apportioned into vials for lyophilization. Each vial will contain a single dosage (e.g. 1 mg-1 g, generally 1-100 mg, such as 1-5 mg) or multiple dosages of the compound. The lyophilized powder can be stored under appropriate conditions, such as at about 4° C. to room temperature.

[0355] Reconstitution of this lyophilized powder with a buffer solution provides a formulation for use in parenteral administration. The precise amount depends upon the indication treated and selected compound. Such amount can be empirically determined.

[0356] c. Topical Administration

[0357] Topical mixtures are prepared as described for the local and systemic administration. The resulting mixture may be a solution, suspension, emulsions or the like and are formulated as creams, gels, ointments, emulsions, solutions, elixirs, lotions, suspensions, tinctures, pastes, foams, aerosols, irrigations, sprays, suppositories, bandages, dermal patches or any other formulations suitable for topical administration.

[0358] The compounds or pharmaceutically acceptable derivatives thereof may be formulated as aerosols for topical application, such as by inhalation (see, e.g. U.S. Pat. Nos. 4,044,126; 4,414,209; and 4,364,923, which describe aerosols for delivery of a steroid useful for treatment inflammatory diseases, particularly asthma). These formulations for administration to the respiratory tract can be in the form of an aerosol or solution for a nebulizer, or as a microtine powder for insufflation, alone or in combination with an inert carrier such as lactose. In such a case, the particles of the formulation will typically diameters of less than 50 microns, preferably less than 10 microns.

[0359] The compounds may be formulated for local or topical application, such as for topical application to the skin and mucous membranes, such as in the eye, in the form of gels, creams, and lotions and for application to the eye or for intracisternal or intraspinal application. Topical administration is contemplated for transdermal delivery and also for administration to the eyes or mucosa, or for inhalation therapies. Nasal solutions of the active compound alone or in combination with other pharmaceutically acceptable excipients also can be administered.

[0360] Formulations suitable for transdermal administration are provided. They can be provided in any suitable format, such as discrete patches adapted to remain in intimate contact with the epidermis of the recipient for a prolonged period of time. Such patches contain the active compound in optionally buffered aqueous solution of, for example, 0.1 to 0.2M concentration with respect to the active compound. Formulations suitable for transdermal administration also can be delivered by iontophoresis (see, e.g. Pharmaceutical Research 3(6):318 (1986)) and typically take the form of an optionally buffered aqueous solution of the active compound.

[0361] d. Compositions for Other Routes of Administration

[0362] Depending upon the condition treated other routes of administration, such as topical application, transdermal patches, oral and rectal administration also are contemplated herein. For example, pharmaceutical dosage forms for rectal administration are rectal suppositories, capsules and tablets for systemic effect. Rectal suppositories include solid bodies for insertion into the rectum which melt or soften at body temperature releasing one or more pharmacologically or therapeutically active ingredients. Pharmaceutically acceptable substances utilized in rectal suppositories are bases or vehicles and agents to raise the melting point. Examples of bases include cocoa butter (theobroma oil), glycerin-gelatin, carbowax (polyoxyethylene glycol) and appropriate mixtures of mono-, di- and triglycerides of fatty acids. Combinations of the various bases may be used. Agents to raise the melting point of suppositories include spermaceti and wax. Rectal suppositories may be prepared either by the compressed method or by molding. The typical weight of a rectal suppository is about 2 to 3 mg. Tablets and capsules for rectal administration are manufactured using the same pharmaceutically acceptable substance and by the same methods as for formulations for oral administration.

[0363] Formulations suitable for rectal administration can be provided as unit dose suppositories. These can be prepared by admixing the active compound with one or more conventional solid carriers, for example, cocoa butter, and then shaping the resulting mixture.

[0364] For oral administration, pharmaceutical compositions can take the form of, for example, tablets or capsules prepared by conventional means with pharmaceutically acceptable excipients such as binding agents (e.g. pregelatinized maize starch, polyvinyl pyrrolidone or hydroxypropyl methylcellulose); fillers (e.g. lactose, microcrystalline cellulose or calcium hydrogen phosphate); lubricants (e.g. magnesium stearate, talc or silica); disintegrants (e.g. potato starch or sodium starch glycolate); or wetting agents (e.g. sodium lauryl sulphate). The tablets can be coated by methods well-known in the art.

[0365] Formulations suitable for buccal (sublingual) administration include, for example, lozenges containing the active compound in a flavored base, usually sucrose and acacia or tragacanth; and pastilles containing the compound in an inert base such as gelatin and glycerin or sucrose and acacia.

[0366] Pharmaceutical compositions also can be administered by controlled release formulations and/or delivery devices (see, e.g. in U.S. Pat. Nos. 3,536,809; 3,598,123; 3,630,200; 3,845,770; 3,847,770; 3,916,899; 4,008,719; 4,687,610; 4,769,027; 5,059,595; 5,073,543; 5,120,548; 5,354,566; 5,591,767; 5,639,476; 5,674,533 and 5,733,566).

[0367] Various delivery systems are known and can be used to administer selected compositions, such as but not limited to, encapsulation in liposomes, microparticles, microcapsules, recombinant cells capable of expressing the compound, receptor mediated endocytosis, and delivery of nucleic acid molecules encoding a soluble hyaluronidase or other agent such as retrovirus delivery systems.

[0368] Hence, in certain embodiments, liposomes and/or nanoparticles also can be employed with administration of compositions herein. Liposomes are formed from phospholipids that are dispersed in an aqueous medium and spontaneously form multilamellar concentric bilayer vesicles (also termed multilamellar vesicles (MLVs)). MLVs generally have diameters of from 25 nm to 4 μm. Sonication of MLVs results in the formation of small unilamellar vesicles (SUVs) with diameters in the range of 200 to 500 angstroms containing an aqueous solution in the core.

[0369] Phospholipids can form a variety of structures other than liposomes when dispersed in water, depending on the molar ratio of lipid to water. At low ratios, the liposomes form. Physical characteristics of liposomes depend on pH, ionic strength and the presence of divalent cations. Liposomes can show low permeability to ionic and polar substances, but at elevated temperatures undergo a phase transition which markedly alters their permeability. The phase transition involves a change from a closely packed, ordered structure, known as the gel state, to a loosely packed, less-ordered structure, known as the fluid state. This occurs at a characteristic phase-transition temperature and results in an increase in permeability to ions, sugars and drugs.

[0370] Liposomes interact with cells via different mechanisms: endocytosis by phagocytic cells of the reticuloendothelial system such as macrophages and neutrophils; adsorption to the cell surface, either by nonspecific weak hydrophobic or electrostatic forces, or by specific interactions with cell-surface components; fusion with the plasma cell membrane by insertion of the lipid bilayer of the liposome into the plasma membrane, with simultaneous release of liposomal contents into the cytoplasm; and by transfer of liposomal lipids to cellular or subcellular membranes, or vice versa, without any association of the liposome contents. Varying the liposome formulation can alter which mechanism is operative, although more than one can operate at the same time. Nanocapsules can generally entrap compounds in a stable and reproducible way. To avoid side effects due to intracellular polymeric overloading, such ultrafine particles (sized around 0.1 μm) should be designed using polymers able to be degraded in vivo. Biodegradable polyalkyl-cyanoacrylate nanoparticles that meet these requirements are contemplated for use herein, and such particles can be easily made.

[0371] 2. Formulation Amounts

[0372] The compositions can be formulated for single dosage administration or for multiple dosage administration. The agents can be formulated for direct administration.

[0373] In the compositions provided herein, the polymer-conjugated hyaluronan-degrading enzyme is formulated in an amount for direct administration in a range between or about between 0.5 μg to 50 mg, such as 100 μg to 1 mg, 1 mg to 20 mg, 100 μg to 5 mg, 0.5 μg to 1450 μg, 1 μg to 1000 μg, 5 μg to 1250 μg, 10 μg to 750 μg, 50 μg to 500 μg, 0.5 μg to 500 μg, 500 μg to 1450 μg. For example, the polymer-conjugated hyaluronan-degrading enzyme is formulated in an amount for direct administration in a range between or about between 15 Units (U) or 150 Units (U) to 60,000 Units per dose, 300 U to 30,0000 U, 500 U to 25,000 U, 500 U to 10,000 U, 150 U to 15,000 U, 150 U to 5000 U, 500 U to 1000 U, 5000 U to 45,000 U 10,000 U to 50,000 U or 20,000 U to 60,000 U, for example at least or about at least or about or 15 U, 50 U, 100 U, 200 U, 300 U; 400 U; 500 U; 600 U; 700 U; 800 U; 900 U; 1,000 U; 1250 U; 1500 U; 2000 U; 3000 U; 4000 U; 5,000 U; 6,000 U; 7,000 U; 8,000 U; 9,000 U; 10,000 U; 20,000 U; 30,000 U; 40,000 U; or 50,000 U. The polymer-conjugated hyaluronan-degrading enzyme can be provided as a stock solution at or about 50 U/mL to 15,000 U/mL, such as 10 U/mL to 500 U/mL, 1000 U/mL to 15,000 U/mL, 100 U/mL to 5,000 U/mL, 500 U/mL to 5,000 U/mL or 100 U/mL to 400 U/mL, for example at least or at least about or about or 50 U/mL, 100 U/mL, 150 U/mL, 200 U/mL, 400 U/mL, 500 U/mL, 1000 U/mL, 2000 Units/mL, 3000 U/mL, 4000 U/mL, 5000 U/mL, 6000 U/mL, 7000 U/mL, 8000 U/mL, 9000 U/mL, 10,000 U/mL, 11,000 U/mL, 12,000 U/mL, or 12,800 U/mL. The volume of the composition can be 0.5 mL to 1000 mL, such as 0.5 mL to 100 mL, 0.5 mL to 10 mL, 1 mL to 500 mL, 1 mL to 10 mL, such as at least or about at least or about or 0.5 mL, 1 mL, 2 mL, 3 mL, 4 mL, 5 mL, 6 mL, 7 mL, 8 mL, 9 mL, 10 mL, 15 mL, 20 mL, 30 mL, 40 mL, 50 mL or more. The composition is generally formulated so that the polymer-conjugated hyaluronan-degrading enzyme is not administered in volumes greater than about 50 mL, and typically is administered in a volume of 5-30 mL, generally in a volume that is not greater then about 10 mL. For larger volumes, the time of infusion can be adapted to facilitate delivery of the larger volume. For example, infusion time can be at least 1 minute, 5 minutes, 10 minutes, 20 minutes, 30 minutes, 40 minutes, 50 minutes, 1 hour or more.

[0374] 3. Packaging and Articles of Manufacture

[0375] Also provided are articles of manufacture containing packaging materials, any pharmaceutical composition or combination provided herein, and a label that indicates that the compositions and combinations are to be used for treatment of cancers, such as stromal tumor cancers or solid tumor cancers. Exemplary of articles of manufacture are containers including single chamber and dual chamber containers. The containers include, but are not limited to, tubes, bottles and syringes. The containers can further include a needle for subcutaneous administration.

[0376] In one example, the article of manufacture contains a pharmaceutical composition containing the polymer-conjugated hyaluronan-degrading enzyme. In another example, the article of manufacture contains pharmaceutical compositions containing the polymer-conjugated hyaluronan-degrading enzyme and a further agent (e.g. therapeutic agent). In this example, the agents can be provided together or separately, for packaging as articles of manufacture.

[0377] The articles of manufacture provided herein contain packaging materials. Packaging materials for use in packaging pharmaceutical products are well known to those of skill in the art. See, for example, U.S. Pat. Nos. 5,323,907; 5,052,558; and 5,033,252, each of which is incorporated herein in its entirety. Examples of pharmaceutical packaging materials include, but are not limited to, blister packs, bottles; tubes, inhalers, pumps, bags, vials, containers, syringes, bottles, and any packaging material suitable for a selected formulation and intended mode of administration and treatment.

[0378] The choice of package depends on the agents, and whether such compositions will be packaged together or separately. In general, the packaging is non-reactive with the compositions contained therein. In other examples, some of the components can be packaged as a mixture. In other examples, all components are packaged separately. Thus, for example, the components can be packaged as separate compositions that, upon mixing just prior to administration, can be directly administered together. Alternatively, the components can be packaged as separate compositions for administration separately.

[0379] The components can be packaged in a container. The components are separately packaged in the same container. Generally, examples of such containers include those that have an enclosed, defined space that contains the polymer-conjugated hyaluronan-degrading enzyme, and a separate enclosed, defined space containing the other components or component such that the subsequent areas are separated by a readily removable membrane which, upon removal, permits the components to mix, or which permits the components to be separately administered.

[0380] Any container or other article of manufacture is contemplated, so long as the agents are separated from the other components prior to administration. For suitable embodiments see, e.g. containers described in U.S. Pat. Nos. 3,539,794 and 5,171,081.

[0381] Selected compositions including articles of manufacture thereof also can be provided as kits. Kits can include a pharmaceutical composition described herein and an item for administration provided as an article of manufacture. The kit can, optionally, include instructions for application including dosages, dosing regimens and instructions for modes of administration. Kits also can include a pharmaceutical composition described herein and an item for diagnosis.

### F. METHODS OF ASSESSING ACTIVITY, BIOAVAILABILITY AND PHARMACOKINETICS

[0382] Hyaluronan-degrading enzymes, such as polymer-conjugated hyaluronan-degrading enzyme, for example a hyaluronidase (e.g. PH20 or PEGPH20) can be used to reduce HA levels and can act as a therapeutic agent for the treatment of insulin-resistant-associated diseases and conditions. Assays can be used to assess the in vitro and in vivo activity of a hyaluronan-degrading enzyme. Included among such assays are those that assess the pharmacokinetic and pharmacodynamic properties of a hyaluronan-degrading enzyme, including bioavailability, and tolerability. The activity of a hyaluronan-degrading enzyme can be assessed to determine the effect on insulin action. Assays can also be used to determine insulin action as a result of treatment with a hyaluronan-degrading enzyme. Assays to assess the biological activity of both insulin and a hyaluronan-degrading enzyme are well known in the art. Such assays can be used, for example, to determine appropriate dosages of a hyaluronan-degrading enzyme and the frequency of dosing, for treatment of insulin resistance. This section provides a description of methods that can be used to assess efficacy, responsiveness, tolerability and/or pharmacokinetics of a polymer-conjugated hyaluronan-degrading enzyme therapy.

[0383] 1. In Vitro Assays

[0384] a. Hyaluronidase Activity

[0385] The activity of a hyaluronan-degrading enzyme can be assessed using methods well known in the art. Such assays can include, but are not limited to, measuring amounts of HA in tissue, such as by immunohistochemistry; measurements of soluble HA in plasma; measurements of HA catabolites in blood or urine; or measurements of hyaluronidase activity in plasma. The Examples below exemplify these assays. Other assays such as measurements of pharmacokinetics, methods for which are well known to those of skill in the art, can be used to assess the pharmacokinetic parameters of HA administration.

[0386] For example, the USP XXII assay for hyaluronidase determines hyaluronidase activity indirectly by measuring the amount of undegraded hyaluronic acid, or hyaluronan (HA), substrate remaining after the enzyme is allowed to react with the HA for 30 min at 37° C. (USP XXII-NF XVII (1990) 644-645, United States Pharmacopeia Convention, Inc., Rockville, Md.). A Hyaluronidase Reference Standard (USP) or National Formulary (NF) Standard Hyaluronidase solution can be used in an assay to ascertain the activity, in units, of any hyaluronidase. In one example, activity is measured using a microturbididy assay. This is based on the formation of an insoluble precipitate when HA binds with serum albumin. The activity is measured by incubating hyaluronidase with sodium hyaluronate (hyaluronic acid) for a set period of time (e.g. 10 minutes) and then precipitating the undigested sodium hyaluronate with the addition of acidified serum albumin. The turbidity of the resulting sample is measured at 640 nm after an additional development period. The decrease in turbidity resulting from hyaluronidase activity on the sodium hyaluronate substrate is a measure of hyaluronidase enzymatic activity.

[0387] In another example, hyaluronidase activity is measured using a microtiter assay in which residual biotinylated HA is measured following incubation with hyaluronidase (see, e.g. Frost and Stem (1997) Anal. Biochem. 251:263-269 and U.S. Pub. No. 2005/0260186). The free carboxyl groups on the glucuronic acid residues of HA are biotinylated, and the biotinylated HA substrate is covalently coupled to a microtiter plate. Following incubation with hyaluronidase, the residual biotinylated HA substrate is detected using an avidin-peroxidase reaction and compared to that obtained following reaction with hyaluronidase standards of known activity.

[0388] In another example, blood and urine can be collected at different time points throughout HA administration and assayed for catabolites of hyaluronan. The presence of catabolites is indicative of the degradation of hyaluronan and is thus a measure of the activity of hyaluronidase. Plasma enzyme also can be assessed and measured over time following administration. For example, HA catabolites, which are HA-disaccharide breakdown products, can be assessed using high-performance liquid chromatography (HPLC) to separate and measure saccharide peak areas.

[0389] Other assays various assays to assess hyaluronidase activity, including effects on HA synthesis or degradation, are known to one of skill in the art, including but not limited to any described herein or known in the art, for example, in vitro assays that measure HA degradation (see, e.g. Frost and Stem (1997) Anal. Biochem. 251:263-269); staining tissue or other samples for HA, such as by using an HA-binding protein or other anti-HA reagent (see, e.g. Nishida et al. (1999) J. Biol. Chem. 274:21893-21899); particle exclusion assay (Nishida et al. (1999); Morohashi et al. (2006) Biochem Biophys. Res. Comm. 345:1454-1459); or measuring or assessing HAS mRNA expression for an has gene (Nishida et al. (1999)). Other assays to measure hyaluronidase activity are known in the art and can be used in the methods provided herein (see, e.g. Delpech et al. (1995) Anal. Biochem. 229:35-41; Takahashi et al. (2003) Anal. Biochem. 322:257-263).

[0390] The ability of a modified hyaluronan-degrading enzyme, such as a polymer-conjugated hyaluronan-degrading enzyme, for example a hyaluronidase, including pegylated hyaluronidase, to exhibit therapeutic activity for reducing or prevening insulin resistance can be assessed using any one or more of the assays described above. For example, the ability of a polymer-conjugated hyaluronan-degrading enzyme, such as a hyaluronidase, for example PH20 (e.g. PEGPH20) to reduce hyaluronan levels or content can be assessed using any one or more of the assays above in vitro, ex vivo and/or in vivo. In one example, a polymer-conjugated hyaluronan-degrading enzyme can be administered to a subject with insulin resistance, or an appropriate animal model, and the effect on hyaluronan levels and insulin action can be assessed and compared to subjects or animal models not administered a hyaluronan-degrading enzyme.

[0391] b. Insulin Action

[0392] The ability of insulin to stimulate glucose uptake, such as in muscle, and suppress glucose production, for example hepatic glucose production, can be assessed in vitro. For example, in vitro assays well known in the art can be performed to assess the ability of insulin to stimulate glucose uptake or affect any other of its typical metabolic outcomes. In one method used to measure insulin-stimulated glucose uptake, adipocytes are incubated with labeled glucose, such as 2-deoxy-D-[2,6³-H]glucose or D[U-¹⁴C]glucose with or without insulin. The incorporated radioactivity is then measured to determine the amount of glucose uptake in the presence or absence of insulin (Louveau et al. (2004) J. Endocrinol. 181:271-280; Duttaroy et al. (2005) Diabetes 54:251-258). In vitro assays to assess glucose production in H4IIE cells in the presence of insulin also can be performed (Wang et al. (2000) J. Biochem. 275:14717-14721; Duttaroy et al. (2005) Diabetes 54:251-258).

[0393] In another method, in vitro quantitative measurement of insulin in human serum and plasma can be measured using a solid phase enzyme-linked immunosorbant assay (ELISA). In the assay, wells coated with a monoclonal antibody with high activity for insulin are incubated with the sample, control, and an enzyme conjugate, an antibody linked to horseradish peroxidase, which will form a sandwich complex bound to the well. Unbound conjugates are then washed off with wash buffer. The amount of bound peroxidase is proportional to the concentration of the insulin present in the sample. Upon addition of the substrate and chromogen, the intensity of color will develop in proportion to the concentration of insulin in the sample.

[0394] 2. In Vivo Animal Models

[0395] Animal models can be used to assess the effects of a hyaluronan-degrading enzyme or polymer-conjugated hyaluronan-degrading enzyme as provided herein on HA levels or content. The ability of insulin to stimulate glucose uptake, such as in muscle, and suppress glucose production, for example hepatic glucose production, also can be assessed in vivo. Animal models can be used to assess the effects of administration of a hyaluronan-degrading enzyme on insulin action, for example in an animal that is insulin resistant. In addition, animal models can be used to assess the pharmacokinetics or tolerability of the hyaluronan-degrading enzyme or modified hyaluronan-degrading enzyme.

[0396] Animal models can include, but are not limited to, mice, rats, rabbits, dogs, guinea pigs and non-human primate models, such as cynomolgus monkeys or rhesus macaques. Animal models include genetic models as well as diet-induced insulin-resistant models. For example, diet-induced insulin-resistant models include those in which, prior to administering a hyaluronidase-degrading enzyme, diet-induced insulin resistance can be established in suitable test animals, e.g. mice. In some examples, mice, such as C57/BL67 mice, are fed a high fat diet, such as a diet that contains 60% calories as fat, over an extended period of time, for example two weeks, to establish an animal model of insulin resistance. Exemplary of an animal model of diet-induced insulin resistance involves the development of insulin resistance in animals such as C57/BL67 mice after two weeks on a high fat (60% calories as fat) diet.

[0397] Genetic models also can be used in which animals are rendered to be deficient in one or more genes that results in insulin resistance. Such genetically engineered mouse models (GEMM) can recapitulate the molecular and clinical features of a disease or disorder. For example, exemplary insulin resistant genetic mouse models can result from knockout or mutagenesis of the insulin receptor (Insr), knockout of type 1 insulin-like growth factor receptor (Igf1r), or mutations of genes encoding proteins in the insulin signaling pathway, such as Irs proteins (Nandi et al. (2003) Physiol. Rev. 84:623-647). These mice develop insulin resistance and can exhibit features similar to the human disorder.

[0398] The hyaluronan-degrading enzymes provided herein can be administered to the mice to assess effects on insulin resistance. For example, HA levels can be assessed or measured. In another example, the effects of administering a hyaluronan-degrading enzyme on glucose uptake or hepatic liver production can be assessed.

[0399] 3. Ex Vivo Assays

[0400] Insulin activity and the effects of administration of a hyaluronan-degrading enzyme, such as a pegylated hyaluronidase, can be measured using various ex vivo techniques that are well known in the art.

[0401] In one example, insulin action can be assessed by measuring Akt signaling in muscle, such as in skeletal muscle, as described in Example 11. Protein expression of Akt and phosphorylated Akt can be assessed by Western blotting in muscle, for example skeletal muscle, after performing a biopsy to obtain a muscle sample, such as gastrocnemius or superficial vastus lateralus (SVL) muscle. The biopsy can be performed after treatment with a hyaluronan-degrading enzyme, and phosphorylation of Akt and total Akt can be assessed in the biopsied muscle. Increased phosphorylation and total Akt as compared to a control correlates to increased levels of insulin action.

[0402] In another example, collagen levels, such as collagen IV (ColIV) levels, and vascularization can be assessed in muscle, such as skeletal muscle, to assess the effect of administration of a hyaluronan-degrading enzyme on insulin action. Immunohistochemistry can be used to assess the level of collagen, for example ColIV, in biopsied skeletal muscle, such as gastrocnemius, as exemplified in Example 12. Vascularization can be assessed by determining the percent cardiac output to muscle, i.e. the skeletal muscle blood flow. Increased muscle vascularization can be shown by an increase in expression of the vascular marker CD31 and increased cardiac output to muscle, such as skeletal muscle, as compared to a control.

[0403] Glucose uptake in isolated muscle, such as isolated soleus or extensor digitorum longus (EDL) muscle, can be determined to assess the effects of administration of a hyaluronan-degrading enzyme on insulin action. [³H]2DG uptake can be measured in isolated muscle to determine insulin action (Jorgensen et al. (2004) J. Biol. Chem. 279:1070-1079). Example 13 exemplifies this assay.

[0404] In another example, adipose cells can be assessed to determine insulin action after administration of a hyaluronan-degrading enzyme, such as a pegylated hyaluronidase. These methods are exemplified in Example 14. Adipose cell size and distribution in adipose tissue can be measured and visualized after staining the tissue (Salans et al. (1968) J. Clin. Invest. 47:153-165). RNA can be isolated and assessed for expression of inflammation- and macrophage-specific genes (Livak et al. (2001) Methods. 25:402-408).

[0405] The ability of a polymer-conjugated hyaluronan-degrading enzyme, such as a hyaluronidase, including pegylated hyaluronidase, to affect any one or more of the markers associated with insulin resistance described above, or any other associated markers or phenotypes, can be assessed using any one or more of the assays described above. The methods can be used to assess insulin action in any subject with insulin resistance, including insulin resistance induced by diet, such as a high fat diet.

[0406] 4. Pharmacokinetics, Pharmacodynamics and Tolerability

[0407] Pharmacokinetic or pharmacodynamic studies can be performed using animal models or can be performed during studies with patients to assess the pharmacokinetic properties of a hyaluronan-degrading enzyme, such as a hyaluronidase or modified hyaluronidase (e.g. PEGPH20). Animal models include, but are not limited to, mice, rats, rabbits, dogs, guinea pigs and non-human primate models, such as cynomolgus monkeys or rhesus macaques. In some instances, pharmacokinetic or pharmacodynamic studies are performed using healthy animals. In other examples, the studies are performed using animal models of a disease or disorder for which therapy with a hyaluronan-degrading enzyme is considered, such as animal models of any hyaluronan-associated disease or disorder, for example animal models of insulin resistance.

[0408] The pharmacokinetic properties of a hyaluronan-degrading enzyme, such as a modified hyaluronidase, can be assessed by measuring such parameters as the maximum (peak) concentration (Cₘₐₓ), the peak time (i.e. when maximum concentration occurs; Tₘₐₓ), the minimum concentration (i.e. the minimum concentration between doses; Cₘᵢₙ), the elimination half-life (T_{1/2}), and area under the curve (i.e. the area under the curve generated by plotting time versus concentration; AUC), following administration. The absolute bioavailability of the hyaluronidase can be determined by comparing the area under the curve of hyaluronidase following subcutaneous delivery (AUC_{sc}) with the AUC of hyaluronidase following intravenous delivery (AUCᵢᵥ). Absolute bioavailability (F), can be calculated using the formula: F=([AUC]_{sc}×dose_{sc})/([AUC]ᵢᵥ×doseᵢᵥ). A range of doses and different dosing frequency of dosing can be administered in the pharmacokinetic studies to assess the effect of increasing or decreasing concentrations hyaluronan-degrading enzyme, such as a hyaluronidase or modified hyaluronidase (e.g. PEGylated PH20) in the dose.

[0409] Studies to assess safety and tolerability also are known in the art and can be used herein. Following administration of the hyaluronan-degrading enzyme provided herein, the development of any adverse reactions can be monitored. Adverse reactions can include, but are not limited to, injection site reactions, such as edema or swelling, headache, fever, fatigue, chills, flushing, dizziness, urticaria, wheezing or chest tightness, nausea, vomiting, rigors, back pain, chest pain, muscle cramps, seizures or convulsions, changes in blood pressure and anaphylactic or severe hypersensitivity responses. Typically, a range of doses and different dosing frequencies are be administered in the safety and tolerability studies to assess the effect of increasing or decreasing concentrations of polymer-conjugated hyaluronan-degrading enzyme in the dose.

[0410] Exemplary procedures useful for assessing pharmacodynamic effects of administration of a hyaluronan-degrading enzyme on insulin action include glucose clamp techniques (Brehm et al. (2007) in Clin. Diabetes Res.: Methods and Techniques, Ed. Michael Rosen, pp. 43-76, Example 1; Ayala et al. (2006) Diabetes 55:390-397), as described in Examples 9 and 10. In the hyperinsulinemic euglycemic clamp procedure, exogenous insulin is infused to create hyperinsulinemic plasma insulin concentrations, while the plasma glucose concentration is kept constant at the euglycemic level by means of a variable exogenous glucose infusion. The glucose infusion rate (GIR) required to maintain constant glucose levels during the period of hyperinsulinemia provide a measure of the effect of the infused insulin on glucose metabolism. The GIR is a reflection of the amount of glucose being used by the body (i.e. more exogenous glucose needs to be infused to maintain normal blood glucose levels, when the body is using more glucose), and, therefore, the activity of the administered insulin (i.e. increased insulin action results in reduced endogenous glucose output and increased blood glucose utilization, resulting in an overall decline of blood glucose). Thus, such a procedure can be used to assess insulin action as well as to assess the pharmacokinetic and pharmacodynamic properties of a hyaluronan-degrading enzyme administered to treat insulin resistance. For example, properties such as basal fasting glucose, plasma insulin and plasma non-esterified fatty acid concentrations can be measured during the hyperinsulinemic euglycemic clamp to assess insulin activity. The GIR, endogenous glucose production (endoRₐ) and disappearance rate (R_{d}) and muscle glucose uptake index (R_{g}) in muscle, such as in the gastrocnemius and SVL, can be determined during and after the hyperinsulinemic euglycemic clamp to assess the effects of administration of a hyaluronan-degrading enzyme on insulin activity.

### G. THERAPEUTIC USES

[0411] Polymer-conjugated hyaluronan-degrading enzyme compositions provided herein, such as a polymer-conjugated hyaluronidase or polymer-conjugated PH20 (e.g. PEGPH20), can be used in methods of treating, ameliorating or reversing insulin resistance. Since many pathological conditions, including those induced by visceral fat obesity, are characterized by insulin resistance, the polymer-conjugated hyaluronan-degrading enzymes provided herein also can be used to prevent the onset or occurrence or ameliorate any metabolic syndrome characterized by insulin resistance, such as diabetes (e.g. type 2 diabetes), cardiovascular disease (e.g. heart disease), dyslipidemias, fatty liver or hypertension.

[0412] The therapeutic uses include administration of the polymer-conjugated hyaluronan-degrading enzyme composition to a subject that has insulin resistance. In particular examples, the polymer-conjugated hyaluronan-degrading enzyme is administered in a treatment regime with a corticosteroid in order to ameliorate musculoskeletal side effects that can result upon treatment with a polymer conjugated-hyaluronan-degrading enzyme. The polymer-conjugated hyaluronan-degrading enzyme can be administered alone as the only active ingredient for reducing insulin resistance (with or without a corticosteroid) or in combination with other treatments or agents to ameliorate or reduce insulin resistance. Current pharmaceutical treatments for insulin resistance, including metabolic and cardiovascular disorders, include combinations of lipid-lowering drugs, hypoglycemic drugs, anti-hypertensive agents, diet and exercise.

[0413] The methods herein include selecting subjects for treatment (e.g. prior to treatment) that exhibit signs or symptoms of insulin resistance. In some examples of methods herein, subjects also can be selected for that exhibit increased or elevated levels of hyaluronan in skeletal muscle. Such a selection method can select for patients that are likely to be responsive to treatment with a hyaluronan-degrading enzyme. Further, the methods herein include methods to monitor insulin resistance in order to assess and monitor the therapeutic effectiveness of the treatment.

[0414] In the methods herein for reducing or ameliorating insulin resistance, or for preventing or ameliorating an associated metabolic syndrome, the polymer-conjugated hyaluronan-degrading enzyme can be administered by any route of administration to effect systemic delivery of the enzyme. The polymer-conjugated hyaluronan-degrading enzyme can be administered subcutaneously, intravenously, intramuscularly or by any other systemic route. Typically, the polymer-hyaluronan-degrading enzyme composition is administered intravenously. In another example, the polymer-conjugated hyaluronan-degrading enzyme is administered locally, for example, intramuscularly.

[0415] In the methods provided herein, the polymer-conjugated hyaluronan-degrading enzyme is administered repeatedly to a subject in order to effect chronic reduction in skeletal muscle hyaluronan. The methods of treatment include repeated administration of the polymer-conjugated hyaluronan-degrading enzyme, for example, administration hourly, every several hours, three times daily, twice daily, once daily, every other day, every third day, every week, every other week, every third week, monthly, or other repeated administration. In some examples herein, the methods include continuous administration over a period of time. Typically, as described below, the dosage amount and frequency of administration is such to effect chronic reduction in hyaluronan, and to confer a therapeutic effect by reducing or ameliorating insulin resistance. Methods to assess insulin resistance, including signs and symptoms of insulin resistance, are known to one of skill in the art and can be monitored as described herein. The particular dosage and frequency of administration can be empirically determined.

[0416] A non-limiting description of exemplary methods of use a polymer-conjugated hyaluronan-degrading enzymes, such as hyaluronidase enzymes or soluble hyaluronidase enzyme, for example PH20 (e.g. PEGPH20), for treating insulin resistance and other associated diseases and conditions are described below. The description includes non-limiting examples of dosages, dosage regimes, combination treatments, and selection and monitoring techniques and procedures for use in practice of the methods herein. It is understood that the description set forth herein are exemplary only and are not intended to limit the scope thereof.

[0417] 1. Diseases and Conditions

[0418] a. Insulin Resistance

[0419] Provided herein are methods of reducing, lessening or ameliorating insulin resistance in a subject by administering a polymer-conjugated hyaluronan-degrading enzyme to a subject. As discussed above, insulin resistance is a disorder of glucose metabolism, whereby cells do not respond to insulin leading to a defect in glucose uptake. Insulin resistant persons have a diminished ability to properly metabolize glucose and respond poorly, if at all, to insulin therapy. Generally, insulin resistance is attributable to obesity (visceral fat obesity) in which fat accumulates around the internal organs. In particular, provided herein are methods of using a polymer-conjugated hyaluronan-degrading (such as a hyaluronidase, for example a PH20 (e.g. PEGPH20)) for treating, ameliorating or reducing obesity-induced insulin resistance. Subjects or patients with insulin resistance can be administered a polymer-conjugated hyaluronan-degrading enzyme, such as a hyaluronidase, for example a PH20 (e.g. PEG PH20).

[0420] The methods and uses provided herein are for treating subjects that typically exhibit symptom(s) associated with insulin resistance. In particular, the methods herein can be used to treat obese patients, who generally exhibit signs and symptoms of insulin resistance. Generally, prior to treatment, patients are selected that exhibit one or more signs or symptoms associated with insulin resistance. It is within the level of a skilled physician to diagnose insulin resistance. Subjects that have insulin resistance, including obesity-induced insulin resistance, generally exhibit high blood sugar (hyperglycemia), weight gain, fat storage and difficulty losing weight, increased blood triglyceride levels (hyperlipemia) and increased hyperinsulinemia. Insulin resistance also can be associated with one or more other symptoms such as fatigue, inability to focus, intestinal bloating, increased blood pressure, increased pro-inflammatory cytokines, depression and/or increased hunger.

[0421] Selection of a subject having insulin resistance for treatment with a polymer-conjugated hyaluronan-degrading enzyme in the methods provided herein can be based on fasting insulin levels, fasting plasma glucose (FPG), glucose tolerance testing (GTT or OGTT), quantification using a hyperinsulinemic euglycemic clamp, an insulin tolerance test (ITT), an insulin sensitivity test (IST), continuous infusion of glucose with model assessment (CIGMA), the homeostatic model Assessment (HOMA) index (Matthews et al. (1985) Diabetologia 28:412-419), the Quantitative insulin sensitivity check index (QUICKI; Katz et al. (2000) J. Clin. Endocrinol. Metab. 85:2402-2410), McAuley's index (McAuley et al. (2001) Diabetes Care 24:460-464), Matsuda index (Matsuda and DeFronzo (1999) Diabetes Care 22:1462-1470), Belfiore index (Belfiore et al. (1998) Mol Gen Metab. 63:134-141), Cederholm index (Cederholm and Wibell (1990) Diabetes Res. Clin. Pract. 10:167-175), Gutt index (Gutt et al. (2000) Diabetes Res. Clin. Pract. 47:177-184), Avignon index (Avignon et al. (1999) Int. J. Obes. Relat. Metab. Disord. 23:512-517) or Stumvoll index (Stumvoll et al. (2001) Diabetes Care 24:796-797). Such techniques are well known to one of skill in the art (see, e.g. Borai et al. (2011) BMC Med. Res. Methodol. 11:158; Muniyappa et al. (2008) AJP: Endo. Metab. 294:E15-E26; Ascaso et al. (2003) Diabetes Care 26:3320-5; Radikova (2003) Endocrine Reg. 37:189-194).

[0422] In particular examples herein, subjects exhibiting insulin resistance are selected using a hyperinsulinemic euglycemic clamp during which serum glucose levels are “clamped” at a normal fasting concentration by providing a continuous infusion of insulin and simultaneously infusing a variable glucose. The rate of the glucose infusion is varied based on rapid feedback provided by frequently sampled serum glucose. One of skill in the art is familiar with hyperinsulinemic euglycemic clamp. In an exemplary example of the test, insulin is infused generally at a rate of 10-120 mU/m²/min and a glucose preparation (e.g. 20 to 50% glucose) is infused to maintain blood sugar levels between 5 and 5.5 mmol/L. The blood glucose is monitored so that a steady fasting glucose can be maintained. A glucose infusion rate (GINF or GIR) can be determined, which is the amount of glucose necessary to compensate for an increased insulin level without causing hypoglycemia or hyperglycemia. Blood sugar levels are monitored during the course of infusion, and GINF is typically determined during the last 30 minutes of the 2 hour infusion test as steady state values are generally obtained. A glucose disposal rate (GDR) also can be measured, which is derived from the GINF normalized to total body weight (mg/kg per minute). For example, subjects having insulin resistance can be selected for treatment with a polymer-conjugated hyaluronan-degrading enzyme in the methods herein to reduce or ameliorate insulin resistance based on a hyperinsulinemic euglycemic clamp test in which insulin is infused generally at a rate of about or approximately or at least 40 mU/m²/min, which is equivalent to about 1 mU/min per kg body wt. In such examples, subject are treated that have a GDR of less than 7.5 mg/kg per minute, and generally less than 7.0 mg/kg per minute, 6.5 mg/kg per minute, 6.0 mg/kg per minute, 5.5 mg/kg per minute, 5.0 mg/kg per minute, 4.5 mg/kg per minute, 4.0 mg/kg per minute, 3.5 mg/kg per minute, 3.0 mg/kg per minute or lower.

[0423] Subjects can be selected for treatment with a polymer-conjugated hyaluronan-degrading enzyme in the methods herein based on fasting plasma glucose (FPG) levels. Generally, blood glucose is measured in a subject who has not eaten for at least or about or approximately 8 hours. For example, provided herein is a method of treating, ameliorating or reducing insulin resistance in a subject by administering a hyaluronan-degrading enzyme conjugated to a polymer where the subject is selected based on a FPG of greater than normal, i.e. exhibits hyperglycemia. For example, subjects are treated that exhibit a FPG of greater than or approximately 100 mg/dL, 110 mg/dL, 120 mg/dL, 125 mg/dL, 130 mg/dL, 135 mg/dL, 140 mg/dL or higher.

[0424] Subjects can be selected for treatment with a polymer-conjugated hyaluronan-degrading enzyme in the methods herein based on fasting serum insulin levels. For example, provided herein is a method of treating, ameliorating or reducing insulin resistance in a subject by administering a hyaluronan-degrading enzyme conjugated to a polymer where the subject is selected based on a fasting serum insulin level of greater than normal, i.e. exhibits hyperinsulinemia. For example, subjects are treated that exhibit a fasting serum insulin of greater than or approximately 10 Units/mL, 15 Units/mL, 20 Units/mL, 25 Units/mL, 30 Units/mL, 35 Units/mL, 40 Units/mL or higher.

[0425] Subjects can be selected for treatment with a polymer-conjugated hyaluronan-degrading enzyme in the methods herein using an insulin sensitivity test (IST).

[0426] Subjects are infused with a defined glucose load and a fixed-rate infusion of insulin over approximately 3 hours. For example, insulin and 20% glucose can be infused at 32 and 267 mg/m²/min, respectively. A steady-state plasma glucose level (SSPG) is assessed after suppressing endogenous insulin and glucose secretion with octreotide (Sandostatin) or somatostatin. Blood glucose is monitored during the test, and values averaged during the last 30 minutes to determine the SSPG. In examples of method provided herein of treating, ameliorating or reducing insulin resistance, a hyaluronan-degrading enzyme conjugated to a polymer is administered to a subject having a fasting glucose concentration greater than 150 mg/dL, and generally greater than 160 mg/dL, 170 mg/dL, 180 mg/dL or greater.

[0427] Subjects can be selected for treatment with a polymer-conjugated hyaluronan-degrading enzyme in the methods herein using an insulin tolerance test (Akinmokum et al. (1992) Diabet. Med. 9:432-437). ITT is a test that indirectly measures insulin-stimulated uptake of glucose into skeletal muscle. Following a fast, subjects are given an intravenous bolus of regular insulin (e.g. 0.1 to 0.5 U/kg), and the decline in serum glucose is measured by sampling the blood following the bolus (e.g. within 3 to 30 minutes, such as 3 to 15 minutes). Rate constant for ITT (KITT) can be calculated using the formula KITT (%/min)=0.693/t(½), where t(½) is calculated from the slope of plasma glucose concentration during the sampling period (e.g. 3-15 minutes) after administration of intravenous insulin. Lower insulin-sensitivity index (Kitt) scores mean higher degrees of insulin resistance. A Kitt value below 2.5%/min is indicative of insulin resistance. For examples, in the methods herein of administering a polymer-conjugated hyaluronan-degrading enzyme to a subject for treating or ameliorating insulin resistance in a subject, subjects are selected that exhibit have a Kitt value of less than 2.5%/min, such as less than 2.2%/min, 2.0%/min, 1.8%/min, 1.7%/min, 1.6%/min, 1.5%/min, 1.4%/min, 1.3%/min, 1.2%/min, 1.1%/min, 1.0%/min or less.

[0428] Subjects or patients having insulin resistance also can be selected for treatment with a polymer-conjugated hyaluronan-degrading enzyme using a glucose tolerance test (GTT), which is a test assessing blood glucose levels approximately 2 hours after a fasting subject is dosed with glucose. The test can be performed by infusing glucose intravenously (IVGTT; e.g. about 0.3 g/kg of a 50% glucose) or administering an oral dose of glucose (OGTT; e.g. about 75 grams to 100 grams). Glucose (and sometimes insulin) can be measured at various intervals over 2 to 4 hours. World Health Guidelines (WHO) mandate that after 2 hours after the dose, blood glucose (glycemia) less than 7.8 mmol/L (140 mg/dL) is considered normal, while glycemia of greater than 7.8 mmol/L (140 mg/dL) is indicative of an impaired level. For examples, in the methods herein of administering a polymer-conjugated hyaluronan-degrading enzyme to a subject for treating or ameliorating insulin resistance in a subject, subjects are selected that exhibit glycemia of greater than 7.8 mmol/L, and generally greater than 8.0 mmol/L, 9.0 mmol/L, 10.0 mmol/L, 11.0 mmol/L, 12.0 mmol/L or greater. In other examples, in the methods herein, subjects are treated that exhibit glycemia of greater than 140 mg/dL, 150 mg/dL, 160 mg/dL, 170 mg/dL, 180 mg/dL, 190 mg/dL, 200 mg/dL or greater.

[0429] In another example, subjects or patients having insulin resistance also can be selected for treatment with a polymer-conjugated hyaluronan-degrading enzyme using a frequency sampled intravenous glucose tolerance test (FSIVGTT), in which an intravenous glucose bolus (e.g. about 0.3 g/kg) is administered followed by a 5 minute insulin infusion 20 minutes later. Blood samples are tested for glucose every two minutes for the first 20 minutes and samples are tested for glucose and insulin levels at later times (e.g. at or about 22, 24, 26, 28, 30, 33, 36, 40, 50, 60, 70, 80, 100, 120, 140, 160 and 180 minutes). In some examples of the test, tolbutamide can be given instead of insulin in the modified FSIVGTT to stimulate endogenous insulin secretion at this time. The data are then subjected to minimal model analysis using the computer program MINMOD to generate an index of insulin sensitivity (S₁; see, e.g. Muniyappa et al. (2008) AJP Endo. Metab. 294:E15-E26). The “TISPAG” software can be used to provide S₁ as wells as glucose effectiveness (available from the Department of Physiology, University of Montpellier). In some examples, a simplified procedure as above can be used, whereby only values of blood glucose for each subject are used for the calculations with a concomitant modification in the software to modify the input for insulin values by replacement with a fixed set of values (see, e.g. Perez-Martin et al. (2002) Horm. Metab. Res. 34:102-106). A lower S₁ value is indicative of insulin resistance. For example, in the methods herein of administering a polymer-conjugated hyaluronan-degrading enzyme to a subject for treating or ameliorating insulin resistance in a subject, subjects are selected that exhibit an S₁ (min₋₁/(μU/ml)·10⁻⁴) value of less than 5.0, and generally less than 4.5, 4.0, 3.5, 3.0, 2.5, 2.4, 2.3, 2.2, 2.1, 2.0, 1.9, 1.8, 1.7, 1.6, 1.5 or less.

[0430] In further examples herein, subjects for treatment with a polymer-conjugated hyaluronan-degrading enzyme are selected based on the homeostatic model assessment (HOMA) or HOMA2 index of insulin resistance (see, e.g. Matthews et al. (1985) Diabetologia 28:412-9; Rudenski et al. (1991) Metabolism 40:908-917; Wallace et al. (2004) Diabetes Care 27:1487-95; Levy et al. (1998) Diabetes Care 21:2191-2). The model is based on the presence of elevated fasting glucose levels and the presence of compensatory elevated fasting insulin levels by increased secretion of insulin by β cells, which correlate to the degree of insulin resistance. The model estimates beta cell function (%13) and insulin sensitivity (% S) from simultaneously measured fasting plasma glucose and fasting plasma RIA insulin values (or fasting specific insulin or C-peptide values). An insulin resistance score (HOMA-IR) can be computed with the formula: fasting plasma glucose (mmol/l) times fasting serum insulin (mU/1) divided by 22.5 or insulin (μU/ml)×glucose (mg/dL)/405. Low HOMA-IR values indicate high insulin sensitivity, whereas high HOMA-IR values indicate insulin resistance. Generally, computer-based or calculator-based programs are used to provide a HOMA score. Such models generally are calibrated to give % β and % S values of 100% in normal subjects. A calculator is publicly available and can be downloaded to calculate HOMA values (see e.g. www.dtu.ox.ac.uk/homacalculator/download.php). In examples of the methods herein of administering a polymer-conjugated hyaluronan-degrading enzyme to a subject for treating or ameliorating insulin resistance in a subject, subjects are selected that exhibit a HOMA score of greater than 2.2 or 2.3, and generally greater than 2.5, 2.6, 2.7, 2.8, 2.9, 3.0, 3.5, 4.0, 5.0, 6.0 or greater. For example, a HOMA score of between or about between 2.5 to 2.6 shows insulin resistance.

[0431] In a related example, subjects for treatment with a polymer-conjugated hyaluronan-degrading enzyme are selected based on quantitative insulin sensitivity check index (QUICKI) is related to FSIVGTT and is defined by the formula: 1/(log glucose [mg/dL]+log insulin [μU/ml]). In examples of the methods herein of administering a polymer-conjugated hyaluronan-degrading enzyme to a subject for treating or ameliorating insulin resistance in a subject, subjects are selected that exhibit a QUICKI index of less than 0.360, and generally less than 0.359, 0.358, 0.357, 0.355, 0.350, 0.345, 0.340, 0.335, 0.330, 0.325, 0.320, 0.315, 0.310, 0.305, 0.300 or less.

[0432] In a further example, subjects for treatment with a polymer-conjugated hyaluronan-degrading enzyme are selected based on the McAuley (McA) index (McAuley et al. (2001) Diabetes Care 24:460-464), in which scores are determined based on weighted combinations of fasting insulin, BMI and fasting triglycerides using the following formula: McA=exp (2.63−0.28 ln insulin [μU/ml]−0.31 ln triglycerides [mM/ml]). In examples of the methods herein of administering a polymer-conjugated hyaluronan-degrading enzyme to a subject for treating or ameliorating insulin resistance in a subject, subjects are selected that exhibit a McA index of less than 6.5, and generally less than 6.3, 6.0, 5.9, 5.8, 5.7, 5.6, 5.5, 5.0, 4.5, 4.0, 3.5, 3.0 or less.

[0433] Other methods for assessing insulin resistance, including for selecting subjects having insulin resistance, include any methods known to one of skill in the art. Exemplary of such methods are described in Section F. For example, subjects can be selected based on waist circumference, weight or serum triglycerides, serum HDL cholesterol, blood pressure and other routine clinical measurements (Stern et al. (2005) Diabetes 54:333-339). For example, commonly used criteria and cut-offs for insulin resistance include, for example, a waist circumference in males of greater than 102 cm and in females of greater than 88 cm; BMI of greater than 30 kg/m²; a triglyceride to HDL ratio of greater than 3.0, apolipoprotein B levels greater than 1.36 g/L; blood pressure greater than 135/85 mmHg; and C-reactive protein greater than 3.0 mg/L.

[0434] It is understood that the cut-off values provided herein above correlating the existence of insulin resistance are exemplary only. It is understood that values above or below the indicated values can be indicative of insulin resistance. Variation in the levels can occur due to differences in age, gender, nationality, weight and extent and severity of the condition. It is within the level of a skilled physician to identify patients that exhibit features of insulin resistance. Generally, more than one of any of the above parameters, if present, are indicative of the presence of insulin resistance.

[0435] b. Conditions and Diseases Associated with Insulin Resistance

[0436] Insulin resistance is associated with or can cause or contribute to the pathogenesis of diverse syndromes. In particular, insulin resistance is a component of the “metabolic syndrome,” which is a cluster of debilitating health care problems. Metabolic syndrome is often characterized by any of a number of metabolic disorders or risk factors, which are generally considered to most typify metabolic syndrome when more than one of these factors are present in a single individual. The factors include: central obesity (disproportionate fat tissue in and around the abdomen), atherogenic dyslipidemia (these include a family of blood fat disorders including, e.g. high triglycerides, low HDL cholesterol, and high LDL cholesterol that can foster plaque buildups in the vascular system, including artery walls), high blood pressure (130/85 mmHg or higher), insulin resistance or glucose intolerance (the inability to properly use insulin or blood sugar), a chronic prothrombotic state (e.g. characterized by high fibrinogen or plasminogen activator inhibitor [−1] levels in the blood), and a chronic proinflammatory state (e.g. characterized by higher than normal levels of high-sensitivity C-reactive protein in the blood). People with metabolic syndrome are at increased risk of coronary heart disease, other diseases related to plaque buildups in artery walls (e.g. stroke and peripheral vascular disease) and Type 2 Diabetes.

[0437] Exemplary of diseases and conditions associated with insulin resistance include, but are not limited to, type 2 diabetes mellitus, obesity, arterial hypertension, dyslipidemia, atherosclerosis, coronary disease, polycystic ovary syndrome. Generally, insulin resistance precedes the development of these syndromes, and can occur before the manifestation of such diseases or conditions. Hence, insulin resistance is an early marker of such diseases and conditions. By administering a polymer-conjugated hyaluronan-degrading enzyme to reduce or ameliorate insulin resistance, the methods herein effect prevention or amelioration of diseases or conditions that are associated with insulin resistance.

[0438] Hence, the methods herein of administering a polymer-conjugated hyaluronan-degrading enzyme can be used to prevent, treat or ameliorate diseases and conditions that are associated with insulin resistance, including, but not limited to, type 2 diabetes mellitus, obesity, arterial hypertension, dyslipidemia, atherosclerosis, coronary disease, polycystic ovary syndrome. Exemplary of diseases or conditions associated with insulin resistance are described below. The therapeutic uses described below are exemplary and do not limit the applications of the methods described herein.

[0439] i. Type 2 Diabetes

[0440] Provided herein is a method of preventing or ameliorating type 2 diabetes mellitus (T2DM) by administering a polymer-conjugated hyaluronan-degrading enzyme to a subject as described herein. Diabetes is defined as a state in which carbohydrate and lipid metabolism are improperly regulated by insulin. T2DM is the most common form and results from a combination of defects in insulin secretion and insulin action. Individuals with insulin resistance indicate a pre-diabetic state, are thus predisposed to developing T2DM, as the failure of insulin to stimulate glucose uptake in muscle appears to be a primary defect. For example, prediabetes or insulin resistance is characterized by FPG levels generally less than 125 mg/dL (e.g. 100 to 125 mg/dL), while T2DM is diagnosed if plasma glucose levels are greater than 126 mg/dL. In other examples, a GTT (e.g. IVGTT or OGTT) can be used to diagnose subjects, whereby a 2-hour plasma glucose result of greater than 140 mg/dL, and generally 140 mg/dL to 199 mg/dL indicates diabetes or insulin resistance, while a 2-hour plasma glucose result of greater than 200 mg/dL is indicative of T2DM.

[0441] Pancreatic β cells normally compensate for the insulin resistant state by increasing insulin secretion, which further aggravates insulin resistance. Eventually, the β cells can no longer compensate adequately for insulin resistance by secreting more insulin and thus fail to respond appropriately to glucose. This ultimately leads to the deterioration of glucose homeostasis and the development of glucose intolerance, the inability to properly dispose of glucose. Approximately 5%-10% of glucose-intolerant patients per year progress to T2DM, which continues to worsen as insulin resistance increases. Adipose and liver cells generate more fatty acids, the liver produces more glucose in an unregulated fashion, and the β cells undergo progressive decompensation, resulting in the late stages of the disease, where high doses of exogenous insulin may be required.

[0442] ii. Cardiovascular Disease Provided herein is a method of preventing or ameliorating cardiovascular disease (CVD) by administering a polymer-conjugated hyaluronan-degrading enzyme to a subject as described herein. CVD refers to several types of heart conditions, and is a major cause of morbidity and mortality in much of the world. The most common type is coronary artery disease, which can cause heart attacks, angina, heart failure, and arrhythmias. Other related conditions include stroke, aortic aneurysm and dissection, cardiomyopathy, peripheral arterial disease, and rheumatic heart disease. Hyperinsulinemia has been shown to be a predictor of CVD in insulin resistant individuals (McFarlane et al. (2001) J. Clin. Endocrinol. Metabol. 86(2):713-718; Ginsberg (2000) J. Clin. Invest. 106:453-458). Insulin resistance is associated with risk factors of CVD including an atherogenic lipid profile, endothelial dysfunction and increased risk of thrombosis. In particular, hyperinsulinemia is associated with hypertension, coronary artery disease (CAD), hypercoagulability and atherosclerosis.

[0443] In particular, persons with insulin resistance generally exhibit dyslipidemia. Dyslipidemia develops due to the inability of insulin-resistant fat cells to store triglycerides (TG). There is generally increased intracellular hydrolysis of TGs and release of fatty acids into the circulation. The effect is hypertriglyceridemia and an increase in the production of triglycerides and triglyceride-rich low density lipoproteins (LDL). Decreased levels of high-density lipoprotein (HDL) also exist in persons with insulin resistance. The dyslipidemia can contribute to the development of atherosclerotic plaques.

[0444] In addition to the dyslipidemia, insulin resistance also causes hypertension that can be a separate risk factor to heart disease. Abnormalities in vasodilation and blood flow are possible links between hypertension and insulin resistance. This has been proposed to be due to defects in insulin-stimulated nitrogen oxide (NO) by endothelial cells. Also, hyperinsulinemia can result in increased reabsorption of sodium and water by kidney tubular cells, which can be associated with hypertension. In addition, hyperinsulinemia also can result in hyperuricemia, which can be associated with cardiovascular disease.

[0445] Subjects with insulin resistance also exhibit an increase in factors involved in clotting that are associated with a risk of cardiovascular disease. Such factors include, but are not limited to, fibrinogen, factor VII and plasminogen activator inhibitor 1 (PAI-1). The dysregulation of these factors is due to hyperlipidemia and hyperinsulinemia that occurs in insulin resistance. Impaired insulin action on endothelial or vascular smooth muscle cells that occurs in insulin resistance also can have direct effects on artery wall thickening.

[0446] Iii. Polycystic Ovary Syndrome (PCOS)

[0447] Provided herein is a method of preventing or ameliorating polycystic ovary syndrome (PCOS) by administering a polymer-conjugated hyaluronan-degrading enzyme to a subject as described herein. PCOS is characterized by anovulation (irregular or absent menstrual periods) and hyperandrogenism with elevated serum testosterone and androstenedione. Due to the high levels of androgenic hormones, PCOS results in increased LH levels, anovulation, amenorrhea, recurrent pregnancy loss and infertility Hyperinsulinemia that accompanies insulin resistance produces the hyperandrogenism by increasing ovarian androgen production, such as testosterone, and decreasing the serum sex hormone binding globulin concentration.

[0448] 2. Dosage and Dosage Regimen (Frequency and Cycle of Administration)

[0449] The polymer-conjugated hyaluronan-degrading enzyme, for example a hyaluronidase such as a PH20 (e.g. PEGPH20) is administered in an amount sufficient to exert a therapeutically useful effect. It is within the level of one of skill in the art to determine the precise amounts of polymer-conjugated hyaluronan-degrading enzyme to be administered to a subject. It is understood that the precise dosage and duration of treatment is a function of the particular subject (e.g. age of the individual treated, the weight of the individual), the route of administration, the disease or condition being treated, the severity or extent of the disease or condition being treated and other similar factors. Based on such factors, the precise dosage, and frequence of dosage, can be determined empirically using known testing protocols or by extrapolation from in vivo or in vitro test data and/or can be determined from known dosing regimes of the particular agent. For example, the amount of a polymer-conjugated hyaluronan-degrading enzyme, such as a soluble hyaluronidase, for example a PH20 (e.g. PEGPH20), to be administered for the treatment of a disease or condition, for example insulin resistance or a metabolic syndrome associated with insulin resistance, can be determined by standard clinical techniques. In addition, in vitro assays and animal models can be employed to help identify optimal dosage ranges.

[0450] Generally, dosage regimens are chosen to limit toxicity. It should be noted that the attending physician would know how to and when to terminate, interrupt or adjust therapy to lower dosage due to toxicity, or bone marrow, liver or kidney or other tissue dysfunctions. Conversely, the attending physician would also know how to and when to adjust treatment to higher levels if the clinical response is not adequate (precluding toxic side effects). It is to be further understood that for any particular subject, specific dosage regimens should be adjusted over time according to the individual need and the professional judgment of the person administering or supervising the administration of the formulations, and that the concentration ranges set forth herein are exemplary only and are not intended to limit the scope thereof.

[0451] For example, the polymer-conjugated hyaluronan-degrading enzyme, such as a hyaluronidase for example a PH20 (e.g. PEGPH20), is administered in a therapeutically effective amount to degrade, cleave or remove skeletal muscle-associated hyaluronan. Exemplary dosage range is at or about 50 Units to 50,000,000 Units of a hyaluronan-degrading enzyme conjugated to a polymer, or a functionally equivalent amount of another hyaluronan-degrading enzyme conjugated to a polymer. It is understood herein that a unit of activity is normalized to a standard activity, for example, an activity as measured in a microturbidity assay assaying hyaluronidase activity.

[0452] Thus, for example, a hyaluronan-degrading enzyme, such as a hyaluronidase for example a PH20, conjugated to polymer, for example, a PEG, can be administered at or about 10 to 50,000,000 Units, 10 to 40,000,000 Units, 10 to 36,000,000 Units, 10 to 12,000,000 Units, 10 to 1,200,000 Units, 10 to 1,000,000 Units, 10 to 500,000 Units, 100 to 100,000 Units, 500 to 50,000 Units, 1000 to 10,000 Units, 5000 to 7500 Units, 5000 Units to 50,000 Units, or 1,000 to 10,000 Units. Generally, a polymer-conjugated hyaluronan-degrading enzyme is administered to a subject in an amount that is between or about between 0.01 μg/kg to 25 mg/kg, such as 0.0005 mg/kg (0.5 μg/kg) to 25 mg/kg, 0.5 μg/kg to 10 mg/kg (320,000 U/kg), 0.02 mg/kg to 1.5 mg/kg, 0.01 μg/kg to 15 μg/kg, 0.05 mg/kg to 10 mg/kg, 0.75 μg/kg to 7.5 μg/kg or 1.0 μg/kg to 3.0 μg/kg. The polymer-conjugated hyaluronan-degrading enzyme can be administered, for example, at a dosage of at least or about at least 0.0005 mg/kg (of the subject), 0.0006 mg/kg, 0.0007 mg/kg, 0.0008 mg/kg, 0.0009 mg/kg, 0.001 mg/kg, 0.0016 mg/kg, 0.002 mg/kg, 0.003 mg/kg, 0.004 mg/kg, 0.005 mg/kg, 0.006 mg/kg, 0.007 mg/kg, 0.008 mg/kg, 0.009 mg/kg, 0.01 mg/kg, 0.016 mg/kg, 0.02 mg/kg, 0.03 mg/kg, 0.04 mg/kg, 0.05 mg/kg, 0.06 mg/kg, 0.07 mg/kg, 0.08 mg/kg, 0.09 mg/kg, 0.1 mg/kg, 0.15 mg/kg, 0.2 mg/kg, 0.25 mg/kg, 0.30 mg/kg, 0.35 mg/kg, 0.40 mg/kg, 0.45 mg/kg, 0.5 mg/kg, 0.55 mg·kg, 0.6 mg/kg, 0.7 mg/kg, 0.8 mg/kg, 0.9 mg/kg, 1.0 mg/kg, 1.1 mg/kg, 1.2 mg/kg, 1.3 mg/kg, 1.4 mg/kg, 1.5 mg/kg, 1.6 mg/kg, 1.7 mg/kg, 1.8 mg/kg, 1.9 mg/kg, 2 mg/kg, 2.5 mg/kg, 3 mg/kg, 3.5 mg/kg, 4 mg/kg, 4.5 mg/kg, 5 mg/kg, 5.5 mg/kg, 6 mg/kg, 6.5 mg/kg, 7 mg/kg, 7.5 mg/kg, 8 mg/kg, 8.5 mg/kg, 9 mg/kg, 9.5 mg/kg, 10 mg/kg, 11 mg/kg, 12 mg/kg, 13 mg/kg, 14 mg/kg, 15 mg/kg, 16 mg/kg, 17 mg/kg, 18 mg/kg, 19 mg/kg, 20 mg/kg, 21 mg/kg, 22 mg/kg, 23 mg/kg, 24 mg/kg, 25 mg/kg, or more is administered, to an average adult human subject, typically weighing about 70 kg to 75 kg.

[0453] A polymer-conjugated hyaluronan-degrading enzyme, such as a PEGylated hyaluronidase (e.g. PEGPH20), provided herein can be administered at between or about between 1 Unit/kg to 800,000 Units/kg, such as 10 to 800,000 Units/kg, 10 to 750,000 Units/kg, 10 to 700,000 Units/kg, 10 to 650,000 Units/kg, 10 to 600,000 Units/kg, 10 to 550,000 Units/kg, 10 to 500,000 Units/kg, 10 to 450,000 Units/kg, 10 to 400,000 Units/kg, 10 to 350,000 Units/kg, 10 to 320,000 Units/kg, 10 to 300,000 Units/kg, 10 to 280,000 Units/kg, 10 to 260,000 Units/kg, 10 to 240,000 Units/kg, 10 to 220,000 Units/kg, 10 to 200,000 Units/kg, 10 to 180,000 Units/kg, 10 to 160,000 Units/kg, 10 to 140,000 Units/kg, 10 to 120,000 Units/kg, 10 to 100,000 Units/kg, 10 to 80,000 Units/kg, 10 to 70,000 Units/kg, 10 to 60,000 Units/kg, 10 to 50,000 Units/kg, 10 to 40,000 Units/kg, 10 to 30,000 Units/kg, 10 to 20,000 Units/kg, 10 to 15,000 Units/kg, 10 to 12,800 Units/kg, 10 to 10,000 Units/kg, 10 to 9,000 Units/kg, 10 to 8,000 Units/kg, 10 to 7,000 Units/kg, 10 to 6,000 Units/kg, 10 to 5,000 Units/kg, 10 to 4,000 Units/kg, 10 to 3,000 Units/kg, 10 to 2,000 Units/kg, 10 to 1,000 Units/kg, 10 to 900 Units/kg, 10 to 800 Units/kg, 10 to 700 Units/kg, 10 to 500 Units/kg, 10 to 400 Units/kg, 10 to 300 Units/kg, 10 to 200 Units/kg, 10 to 100 Units/kg, 16 to 600,000 Units/kg, 16 to 500,000 Units/kg, 16 to 400,000 Units/kg, 16 to 350,000 Units/kg, 16 to 320,000 Units/kg, 16 to 160,000 Units/kg, 16 to 80,000 Units/kg, 16 to 40,000 Units/kg, 16 to 20,000 Units/kg, 16 to 16,000 Units/kg, 16 to 12,800 Units/kg, 16 to 10,000 Units/kg, 16 to 5,000 Units/kg, 16 to 4,000 Units/kg, 16 to 3,000 Units/kg, 16 to 2,000 Units/kg, 16 to 1,000 Units/kg, 16 to 900 Units/kg, 16 to 800 Units/kg, 16 to 700 Units/kg, 16 to 500 Units/kg, 16 to 400 Units/kg, 16 to 300 Units/kg, 16 to 200 Units/kg, 16 to 100 Units/kg, 160 to 12,800 Units/kg, 160 to 8,000 Units/kg, 160 to 6,000 Units/kg, 160 to 4,000 Units/kg, 160 to 2,000 Units/kg, 160 to 1,000 Units/kg, 160 to 500 Units/kg, 500 to 5000 Units/kg, 1000 to 100,000 Units/kg or 1000 to 10,000 Units/kg, of the mass of the subject to whom it is administered. In some examples, a hyaluronan-degrading enzyme, such as a polymer-conjugated hyaluronan-degrading enzyme, such as a PEGylated hyaluronidase (e.g. PEGPH20) can be administered at or about 1 Unit/kg to 1000 Units/kg, 1 Units/kg to 500 Units/kg or 10 Units/kg to 50 Units/kg.

[0454] Generally, where the specific activity of the PEGylated hyaluronidase is or is about 10,000 U/mg to 80,000 U/mg, such as 20,000 U/mg to 60,000 U/mg or 18,000 U/mg to 45,000 U/mg, generally at or about 1 Units/kg (U/kg), 2 U/kg, 3 U/kg, 4 U/kg, 5 U/kg, 6 U/kg, 7 U/kg, 8 U/kg, 8 U/kg 10 U/kg, 16 U/kg, 32 U/kg, 64 U/kg, 100 U/kg, 200 U/kg, 300 U/kg, 400 U/kg, 500 U/kg, 600 U/kg, 700 U/kg, 800 U/kg, 900 U/kg, 1,000 U/kg, 2,000 U/kg, 3,000 U/kg, 4,000 U/kg, 5,000 U/kg, 6,000 U/kg, 7,000 U/kg, 8,000 U/kg, 9,000 U/kg, 10,000 U/kg, 12,800 U/kg, 20,000 U/kg, 32,000 U/kg, 40,000 U/kg, 50,000 U/kg, 60,000 U/kg, 70,000 U/kg, 80,000 U/kg, 90,000 U/kg, 100,000 U/kg, 120,000 U/kg, 140,000 U/kg, 160,000 U/kg, 180,000 U/kg, 200,000 U/kg, 220,000 U/kg, 240,000 U/kg, 260,000 U/kg, 280,000 U/kg, 300,000 U/kg, 320,000 U/kg, 350,000 U/kg, 400,000 U/kg, 450,000 U/kg, 500,000 U/kg, 550,000 U/kg, 600,000 U/kg, 650,000 U/kg, 700,000 U/kg, 750,000 U/kg, 800,000 U/kg or more, per mass of the subject, is administered. For example, 60,000 U; 70,000 U; 80,000 U; 90,000 U; 100,000 U; 200,000 U; 300,000 U; 400,000 U; 500,000 U; 600,000 U; 700,000 U; 800,000 U; 900,000 U; 1,000,000 U; 1,500,000 U; 2,000,000 U; 2,500,000 U; 3,000,000 U; 3,500,000 U; 4,000,000 U or more is administered.

[0455] The polymer-conjugated hyaluronan-degrading enzyme can be administered intravenously, subcutaneously, intratumorally, intradermally, orally or by other routes of administration

[0456] The frequency and timing of administration, and the dosage amounts, can be administered periodically over a cycle of administration to maintain a continuous and/or long term effect of the hyaluronan-degrading enzyme for a desired length of time. Hence, chronic reduction of skeletal muscle-associated hyaluronan can be achieved. The compositions can be administered hourly, daily, weekly, monthly, yearly or once. The length of time of the cycle of administration can be empirically determined, and is dependent on the disease to be treated, the severity of the disease, the particular patient, and other considerations within the level of skill of the treating physician. The length of time of treatment with a composition provided herein can be one week, two weeks, one months, several months, one year, several years or more. The dosages can be divided into a plurality of dosages over the course of a cycle of administration during the course of treatment. For example, the frequency of administration of a polymer-conjugated hyaluronan-degrading enzyme, such as a hyaluronidase enzyme, for example a PH20 (e.g. PEGPH20) in a cycle of administration can be once weekly, twice weekly, three times a week, four times a week, five times a week, six times a week or seven times a week during a cycle of administration. Exemplary of a dosage regime herein is administration of a polymer-conjugated hyaluronan-degrading enzyme to a subject twice a week for four weeks (e.g. 28 days), which cycle is repeated at the discretion of the treating physician. If disease symptoms persist in the absence of discontinued treatment, treatment can be continued for an additional length of time. Over the course of treatment, evidence of disease and/or treatment-related toxicity or side effects can be monitored.

[0457] In addition, the cycle of administration can be tailored to add periods of discontinued treatment in order to provide a rest period from exposure to the agent. The length of time for the discontinuation of treatment can be for a predetermined time or can be empirically determined depending on how the patient is responding or depending on observed side effects. For example, the treatment can be discontinued for one week, two weeks, one month or several months. Generally, the period of discontinued treatment is built into a cycle of dosing regime for a patient.

[0458] For example, an exemplary dosing regime is a treatment cycle or cycle of administration of 28 days. The agent, such as the polymer-conjugated hyaluronan-degrading enzyme, can be administered once weekly, twice weekly or three times a week. For example, the agent can be administered for the first 3 weeks, once weekly, twice weekly or three times a week, followed by a one week without dosing. Thus, for example, a patient can be dosed with the agent twice weekly on days 1, 4, 8, 11, 15 and 18 (or days 0, 3, 6, 9, 12 and 15 or other variations), followed by a one-week of discontinued treat, over the course of the 28-day cycle. In another example, a patient can be dosed with the agent once weekly on days 1, 8 and 16 (or other variation of once weekly dosing, followed by a one-week of discontinued treatment over the course of the 28-day cycle. In another example, the agent can be administered for the full 28 days once weekly, twice weekly or three times a week. Thus, for example, a patient can be dosed with the agent twice weekly on days 1, 4, 8, 11, 15, 18, 21 and 24 (or days 0, 4, 7, 11, 14, 18, 21 or 25 or other variations of twice weekly dosing) for the full 28 day cycle. In other examples, a patient can be dosed with the agent once weekly on days 1, 8, 16 or 24 (or other variations of a once weekly dosing) for the full 28 day cycle. It is understood that the above description is for exemplification purposes only and that variations of the above can be employed.

[0459] It is within the level of one of skill in the art to determine the precise cycle of administration and dosing schedule. As noted above, the cycle of administration can be for any desired length of time. For example, the cycle of administration can be continued over the course of several months or years. Hence, the 28-day cycle of administration can be repeated for any length of time. It is within the level of skill of the treating physician to adopt a cycle of administration and dosing regime that meets the needs of the patient depending on personal considerations specific to the patient and disease to be treated.

[0460] 3. Selecting Insulin Resistant Subjects Having Increased Skeletal Muscle Hyaluronan

[0461] The methods herein include steps for selecting subjects for treatment that have increased or elevated hyaluronan (HA) levels associated with skeletal muscle. Exemplary assays for detecting hyaluronan include direct and indirect assays for measuring HA level and/or relative HA levels in a skeletal muscle sample from a subject, assays for analyzing effects of hyaluronan-degrading enzymes on a skeletal muscle sample from the subject, and other parameters associated with hyaluronan levels such as hyaluronidase expression or activity, interstitial fluid pressure, vascular volume and water content. In general, any known assay for detection of proteins or nucleic acids in samples from subjects, or for assessing the effects of treatment on cells/tissues in vitro can be used. One of skill in the art is familiar with methods of detecting hyaluronan, which include, but are not limited to, immunohistochemistry methods or ELISA methods.

[0462] Subjects selected for treatment in the methods provided herein include subjects having elevated, aberrant or accumulated levels of hyaluronan in skeletal muscle compared to subjects not having the disease or condition (e.g. insulin resistance) or compared to normal tissues or samples that do not have elevated, aberrant or accumulated expression of HA. Any sample or tissue from a subject can be tested and compared to a normal sample or tissue. For example, hyaluronan levels can be measured from any source such as from a tissue (e.g. by biopsy), tumor, cells, or from blood, serum, urine or other body fluids. Generally, skeletal muscle samples are collected by biopsy and hyaluronan levels assessed and compared. In such examples, the marker is elevated or increased if the detected HA levels are elevated compared to normal subjects, e.g. elevated from between at or about 2-fold to at or about 9-fold, e.g. increased at least or at or about 2, 3, 4, 5, 6, 7, 8 or 9-fold elevation compared to normal subject.

[0463] In one example, the step for detecting hyaluronan markers is performed prior to treating a subject, for example, to determine whether the subject has elevated or increased hyaluronan levels that will be amenable to treatment with a hyaluronan-degrading enzyme as described herein. In this example, if the marker is detected (e.g. if it is determined that a skeletal muscle tissue sample or a fluid sample from the patient contains elevated hyaluronan expression or is responsive to hyaluronan-degrading enzyme), a treatment step is performed, where a polymer-conjugated hyaluronan-degrading enzyme is administered to the subject.

[0464] In another example, the step for detecting markers is performed after treating a subject, or during the course of treatment of the subject, (e.g. treatment with a polymer-conjugated hyaluronan-degrading enzyme (e.g. soluble modified hyaluronidase such as a PH20, for example a PEGPH20), for example, to determine whether the treatment with the hyaluronan-degrading enzyme is having an effect on treating the disease or condition. In one such example, the marker is not detected or is detected at an amount or relative level that is decreased compared to the amount/level prior to treatment, or compared to another sample, treatment can be discontinued or modified (i.e. dosage decreased or frequency of administration decreased). In another such example, if the marker is detected at the same level as prior to treatment or another sample, treatment can be continued or another treatment option can be selected. In a further example, if the marker is detected at an increased level as prior to treatment or another sample, treatment can be continued, treatment can be modified (e.g. dosage increased or frequency of administration increased), or another treatment, such as a combination therapy, is initiated.

[0465] The assays to detect hyaluronan markers include assays to measure amount (e.g. relative amount) of hyaluronan and/or hyaluronidase expression in a tissue (e.g. skeletal muscle such as gastrocnemius), cell and/or body fluid of a subject. Included amongst such assays are those that can detect HA expression, a hyaluronan synthase (e.g. HAS2) expression, and the presence of hyaluronan-degrading enzymes, such as hyaluronidases, for example, in samples from the subject.

[0466] Assays to detect protein and nucleic acid levels are well known in the art and can be used in the methods herein to measure hyaluronan, hyaluronan synthase or other protein and/or nucleic acid expression. Such assays include, but are not limited to, ELISA, SDS-PAGE, Western Blot, PCR, RT-PCR, immunohistochemistry, histology and flow cytometry. For example, a sample from a subject, such as a tissue sample (e.g. a biopsy of a skeletal muscle from a patient or animal model), a fluid (e.g. blood, urine, plasma, saliva or other sample), a cell or cellular sample, or extract, or other sample, can be stained with anti-HA antibodies or other HA binding protein (e.g. HABP), for example, using histological staining, such as immunohistochemistry (IHC) of fixed or frozen tissue sections, to determine the presence and extent of hyaluronan in the tissue or sample, or immunofluorescent cellular staining, pull-down assays, and flow cytometry. For example, tissue extracts (from diseased subjects and control or reference samples) can be coated on microwell plates, followed by incubation (e.g. 16 hours, room temperature) with a labeled (e.g. biotinylated) HA binding protein, washed and the HA-binding protein bound to the wells quantified using an avidin-biotin detection agent substrate. Such methods are well known in the art. In another example, the sample, e.g. biopsy, can be assayed by RT-PCR to assess the amount of HA mRNA.

[0467] In a further example, hyaluronan synthase 2 (HAS2) production and/or expression by cells in vitro, ex vivo or in vivo also can be assayed by, for example, ELISA, SDS-PAGE, Western Blot, PCR, RT-PCR, immunohistochemistry, histology or flow cytometry. In another example, the amount of hyaluronidase activity in a sample from the subject is determined, such as in the blood or plasma such as with a turbidity assay.

[0468] In another example, a cell or other tissue from a patient is isolated, e.g. a isolated muscle or skeletal muscle cell, and used in a study to determine whether the cell or tissue is responsive to treatment with the hyaluronan-degrading enzyme in vitro, for example, an assay to assess signaling, proliferation, metabolic uptake or growth of the cell or tissue. For example, skeletal muscle cells from a subject can be seeded on surface, such as an extracellular matrix or protein mixture, such as the mixture sold under the trade name Matrigel® (BD Biosciences). In this example, the hyaluronan-associated marker is the sensitivity of the cell or tissue to administration of hyaluronan-degrading enzyme. In this example, if any property, such as proliferation, growth or survival of the cells, is inhibited or blocked by addition of hyaluronan-degrading enzyme, it is determined that the subject may be amenable to treatment with hyaluronan-degrading enzyme containing compositions.

[0469] In addition to assays for determining hyaluronan expression levels, other assays can be used to select a subject for treatment, and/or to assess treatment efficacy and/or duration. For example, interstitial fluid pressure (IFP) can be assessed by methods and techniques well known to one of skill in the art. In one example, IFP can be measured using an appropriate probe or instrument. For example, a transducer-tipped catheter can be used to measure the IFP in muscle tissues or other tissues of interest. The catheter is passed through the inner bore of a surgical needle, which is then inserted into the muscle. The needle is withdrawn while the catheter is held in position. The IFP (mmHg) can then be measured using an appropriate data acquisition unit (Ozerdem et al. (2005) Microvasc. Res. 70:116-120). Other methods to measure IFP include the wick-in-needle method (Fadnes et al. (1977) Microvasc. Res. 14:27-36).

[0470] Skeletal muscle vascular volume changes also can be measured by methods and techniques well known to one of skill in the art. For example, vascular volume can be measured by, for example, using ultrasound imaging. This method employs hyper-echoic microbubbles to provide the strong ultrasound wave reflections that are detected. The microbubbles, when injected, such as intravenously, into a subject or animal model, become trapped in the vascular space due to their size. Assays to assess tissue water content, such as muscle tissue water content, also are known in the art. For example, samples from a muscle can be harvested, blotted, weighed and snap frozen before being lyophilized. The water weight is then reported as the tissue wet weight to dry (i.e. lyophilized) weight ratio.

[0471] For any of the detection methods, the marker (e.g. HA expression, responsiveness to hyaluronan-degrading enzyme, HA-synthase expression or hyaluronidase activity) typically is compared to a control sample, such that detection of the marker typically includes determining that the readout is elevated or reduced compared to the control sample. It is understood that the particular change, e.g. increase in or decrease in HA, is dependent on the assay used. For example, in an ELISA, the fold increase or decrease in absorbance at a particular wavelength or in quantity of protein (e.g. as determined by using a standard curve) can be expressed relative to a control. In a PCR assay, such as RT-PCR, expression levels are compared to control expression levels (e.g. expressed as fold change) using methods known to those of skill in the art, such as using standards. For example, when the amount of hyaluronan in a sample from a subject is being tested, tissue (e.g. skeletal muscle), cell (e.g. skeletal muscle cell), or fluid (e.g. blood) is determined to have increased or elevated HA if the amount of HA in the tissue, cell or fluid is elevated at or about 0.5-fold, 1-fold, 2-fold, 3-fold, 4-fold, 5-fold, 6-fold, 7-fold, 8-fold, 9-fold, 10-fold, 11-fold, 12-fold, 13-fold, 14-fold, 15-fold, 20-fold, or more, compared to the control sample.

[0472] For example, the control sample can be another tissue, cell or body fluid, such as a normal tissue, cell or body fluid, for example, a tissue, cell or body fluid that is analogous to the sample being tested, but isolated from a different subject, such as a subject that is normal (i.e. does not exhibit insulin resistance, or does not have the type of disease or condition that the subject being tested has), or an analogous tissue from another subject that has a similar disease or condition, but whose disease is not as severe and/or expresses relatively less hyaluronan. Generally, for purposes of selecting patients exhibiting increased or elevated HA, the control sample is a fluid, tissue, extract (e.g. cellular or nuclear extract), nucleic acid or peptide preparation, cell line, biopsy, standard or other sample, with a known amount or relative amount of HA. For example, human skeletal muscle cell lines are known and available and can serve as control or reference samples. Exemplary of such cells lines include characterized lots of primary human skeletal muscle derived cells (HDkMDC; e.g. obtained from Cook Myosite, Pittsburgh, Pa.; Cell Applications, San Diego, Calif.; or other similar commercial provider or vendor or source). Cell lines also can be used (e.g. Caviedes et al. (1992) Biochimica et Biophysica Acta (BBA)—Molecular Cell Research, 1134:247-255). In other examples, typically for monitoring the course of treatment, the sample is a skeletal muscle tissue or cell, and is compared to a reference sample obtained from the same subject prior to treatment or at an earlier point in treatment.

[0473] 4. Monitoring Subjects for Reduced Insulin Resistance

[0474] The polymer-conjugated hyaluronan-degrading enzymes provided herein reduce, lessen or ameliorate insulin resistance, and thereby also can prevent or ameliorate diseases and conditions associated with insulin resistance, including diabetes and cardiovascular disease. The insulin resistance or insulin sensitivity of the subject can be monitored over time to assess whether a reduction in insulin resistance has been achieved over the course of therapy with a hyaluronan-degrading enzyme, such as a hyaluronan-degrading enzyme provided herein conjugated to a polymer. Typically, the hyaluronan-degrading enzyme is administered until the insulin resistance is reduced by at least 5%, 10%, 20%, 30%, 40%, 50%, 60%, 70%, 80% or more.

[0475] In the methods herein, in order to assess a reduction in insulin resistance, the subjects can be monitored during the course of treatment for features or parameters associated with insulin resistance. Typically, one or more signs or symptoms from among hyperglycemia, body fat, weight, hyperlipemia and/or hyperinsulinemia can be monitored. An effective dosage amount or dosage regime is generally one that ameliorates, reduces, lessens or prevents one or more of hyperglycemia, body fat, weight, hyperlipemia and/or hyperinsulinemia in the subject compared to a control or reference. The control or reference can be a standard or can be a sample from a normal or healthy subject. In other instances, the control or reference can be a sample from the same subject prior to treatment or a sample taken during an earlier time of the dosage cycle (e.g. taken following the previous administration of a hyaluronan-degrading enzyme).

[0476] For example, any of the methods or tests described above to select subject having insulin resistance can be used to assess insulin resistance during the course of treatment. Hence, in the methods herein, the treatment can be monitored to confirm that the treatment is effective. i.e. it prevents, ameliorates or reduces the incidence of insulin resistance and/or the development of an associated metabolic syndrome. For example, therapeutic effectiveness of administered polymer-conjugated hyaluronan-degrading enzyme can be monitored using any of the above tests or methods, including but not limited to GTT, a hyperinsulinemic euglycemic clamp, ITT, IST, CIGMA, HOMA or QUICKI. It is understood that the method used for determining if a patient has insulin resistance and is a candidate for treatment with a polymer-conjugated hyaluronan-degrading enzyme does not need to be the same method that is used to monitor the treatment following administration of the polymer-hyaluronan-degrading enzyme. It is known to one of skill in the art that the tests and methods for assessing insulin resistance generally correlate and can be compared. Hence, in some examples, the test or method used to assess insulin resistance and select subjects for treatment is different than the test or method used to monitor treatment with an administered polymer-conjugated hyaluronan-degrading enzyme. In other instances, the test or method used to assess insulin resistance and select subjects for treatment is the same as the test or method used to monitor treatment with an administered polymer-conjugated hyaluronan-degrading enzyme.

[0477] Generally, in any of the tests, treatment of a polymer-conjugated hyaluronan-degrading enzyme is therapeutically effective if the index or parameter of insulin resistance is improved by greater than 5%, 10%, 20%, 30%, 40%, 50%, 60%, 70%, 80% or more compared to the same index or parameter prior to treatment or prior to an earlier time of the dosage cycle (e.g. taken following the previous administration of a hyaluronan-degrading enzyme).

[0478] In one example, a hyperinsulinemic euglycemic clamp can be effected on a subject during the course of treatment, and GDR can be monitored during the course of treatment to assess the therapeutic efficacy of an administered polymer-conjugated hyaluronan-degrading enzyme. Treatment can be continued until GDR is increased by greater than 5%, 10%, 20%, 30%, 40%, 50%, 60%, 70%, 80% or more. Generally, insulin resistance is ameliorated when GDR levels are greater than 7.0 mg/kg per minutes or higher, and generally greater than 7.5 mg/kg per minute, 7.6 mg/kg/min, 7.7 mg/kg per minute, 7.8 mg/kg per minute, 7.9 mg/kg per minute, 8.0 mg/kg per minute, 8.5 mg/kg per minute, 9.0 mg/kg per minute or higher.

[0479] In examples herein, fasting serum insulin level can be monitored during the course of treatment to confirm that the hyperinsulinemic is reduced to assess the therapeutic efficacy of an administered polymer-conjugated hyaluronan-degrading enzyme. Treatment can be continued until fast-insulin is reduced by greater than 5%, 10%, 20%, 30%, 40%, 50%, 60%, 70%, 80% or more. Generally, insulin resistance is ameliorated when fasting insulin levels are less than 12 Units/mL, 11 Units/mL, 10 Units/mL, 9 Units/mL, 8 Units/mL, 7 Units/mL, 6 Units/mL, 5 U/mL or less.

[0480] In other examples, an insulin sensitivity test can be used during the course of treatment to monitor treatment, and the SSPG can be monitored during the course of treatment to assess the therapeutic efficacy of an administered polymer-conjugated hyaluronan-degrading enzyme. In examples herein, treatment can be continued until SSPG is decreased by greater than 5%, 10%, 20%, 30%, 40%, 50%, 60%, 70%, 80% or more. Generally, insulin resistance is ameliorated when SSPG levels are less than 150 mg/dL, 140 mg/dL, 130 mg/dL, 120 mg/dL or less.

[0481] In an additional example, an insulin tolerance test can be used during the course of treatment to monitor treatment, and Kitt values obtained to assess the therapeutic efficacy of an administered polymer-conjugated hyaluronan-degrading enzyme. Treatment can be continued Kitt value is increased by greater than 5%, 10%, 20%, 30%, 40%, 50%, 60%, 70%, 80% or more. Generally, insulin resistance is ameliorated when Kitt values are at least or about at least 2.4%/min, such as at least 2.5%/min, 2.6%/min, 2.7%/min, 2.8%/min, 2.9%/min, 3.0%/min, 3.2%/min, 3.4%/min, 3.6%/min, 3.8%/min, 4.0%/min, 5.0%/min or greater.

[0482] In a further example, a glucose tolerance test can be used to monitor blood glucose during the course of treatment to assess the therapeutic efficacy of an administered polymer-conjugated hyaluronan-degrading enzyme. Treatment can be continued until blood glucose is reduced by greater than 5%, 10%, 20%, 30%, 40%, 50%, 60%, 70%, 80% or more. Generally, insulin resistance is ameliorated when blood glucose levels are within the normal range of less than 7.8 mmol/L or less than 140 mg/dL or less.

[0483] In an additional example, a homeostatic model assessment (HOMA) can be made as an index of insulin resistance to assess the therapeutic efficacy of an administered polymer-conjugated hyaluronan-degrading enzyme. Treatment can be continued until HOMA-IR is reduced by greater than 5%, 10%, 20%, 30%, 40%, 50%, 60%, 70%, 80% or more. Generally, insulin resistance is ameliorated when a HOMA score is less than 3.0, such as less than 2.8, 2.6, 2.5, 2.4, 2.3, 2.2, 2.1, 2.0, 1.5, 1.25, 1.0 or less.

[0484] In another example, a quantitative insulin sensitivity check index (QUICKI) can be made as determined as an index of insulin resistance to assess the therapeutic efficacy of an administered polymer-conjugated hyaluronan-degrading enzyme. Treatment can be continued until QUICKI is increased by greater than 5%, 10%, 20%, 30%, 40%, 50%, 60%, 70%, 80% or more. Generally, insulin resistance is ameliorated when a QUICKI score is greater than 3.3, such as greater than 3.4, 3.5, 3.6, 3.7, 3.8, 3.9, 4.0 or greater.

[0485] In a further example, a McAuley (McA) index score can be determined as an indicator of insulin resistance to assess the therapeutic efficacy of an administered polymer-conjugated hyaluronan-degrading enzyme. Treatment can be continued until McA is increased by greater than 5%, 10%, 20%, 30%, 40%, 50%, 60%, 70%, 80% or more. Generally, insulin resistance is ameliorated when a McA score is greater than 5.6, such as greater than 5.8, 6.0, 6.2, 6.5, 6.8, 7.0, 7.5, 8.0 or greater.

[0486] Other methods for assessing insulin resistance, including for monitoring treatment, include any methods known to one of skill in the art. Exemplary of such methods are described in Section F. For example, subjects can be monitored or evaluated for a change in body fat. Body fat measurements can be determined by a variety of techniques known to one of skill in the art, including, but not limited to determinations of skinfold thickness, bioelectrical impedance, air displacement plethysmography, underwater weighing, DEXA scans, measurement on a scale or calculation of body mass index (BMI). Generally, administered polymer-conjugated hyaluronan-degrading enzymes are effective if body fat is decreased by greater than 5%, 10%, 20%, 30%, 40%, 50%, 60%, 70%, 80% or more. Therapeutic effectiveness of also can be determined by a decrease in weight of the subject as determined by a standard scale. Generally, administered polymer-conjugated hyaluronan-degrading enzymes are effective if weight is decreased by greater than 5%, 10%, 20%, 30%, 40%, 50%, 60%, 70%, 80% or more.

[0487] 5. Combination Treatments

[0488] The compositions provided herein can be used alone or in further combination with other therapies or treatments. The compositions provided herein can be further co-formulated or co-administered together with, prior to, intermittently with, or subsequent to, other therapeutic or pharmacologic agents or treatments, such as lipid-lowering drugs, hypoglycemic drugs, anti-hypertensive agents. In some cases, the use of a polymer-conjugated hyaluronan-degrading enzyme can be used in combination with a diet and/or exercise regime. Such agents also can include one or more agents to ameliorate, reduce or prevent side effects.

[0489] A preparation of a second agent or agents or treatment or treatments can be administered at once, or can be divided into a number of smaller doses to be administered at intervals of time. Selected agent/treatment preparations can be administered in one or more doses over the course of a treatment time for example over several hours, days, weeks, or months. In some cases, continuous administration is useful. It is understood that the precise dosage and course of administration depends on the indication and patient's tolerability. Generally, dosing regimes for second agents/treatments herein are known to one of skill in the art.

[0490] a. Other Agents or Treatments for Treating Insulin Resistance or Associated Diseases and Conditions

[0491] The methods provided herein of administering a polymer-conjugated hyaluronan-degrading enzyme for reducing insulin resistance or preventing or ameliorating diseases or conditions associated with insulin resistance, can further include treatment in combination with other agents or treatments for insulin resistance or the diseases or conditions associated with insulin resistance. For example, the agent or treatment can be one that also manages, ameliorates or reduces insulin resistance. In other examples, the further agent or treatment can be one that focuses on a separate (albeit related in some cases) risk factor or component of a disease or conditions associated with insulin resistance. For example, for treatment of CVD, the hypertension or dyslipidemia can be targeted in combination therapy herein by further treating with a lipid-lowering drugs or anti-hypertensive agent. For the treatment of diabetes, insulin can be administered. The particular additional agent or treatment depends on the particular disease or condition (e.g. CVD vs. T2DM). It is within the level of a skilled physician to select an appropriate combination therapy depending on the particular patient being treated (e.g. age and weight), the extent or severity of disease, the history of the patient and other relevant factors.

[0492] For example, the methods herein can include combination treatment effected by weight loss, exercise and/or dietary changes. For example, these dietary changes can include: maintaining a diet that limits carbohydrates to 50 percent or less of total calories; eating foods defined as complex carbohydrates, such as whole grain bread (instead of white), brown rice (instead of white), sugars that are unrefined, increasing fiber consumption by eating legumes (for example, beans), whole grains, fruits and vegetables, reducing intake of red meats and poultry, consumption of “healthy” fats, such as those in olive oil, flaxseed oil and nuts, and/or limiting alcohol intake. In some examples, bariatric surgery can be performed.

[0493] An insulin-sensitizing drug can be used in combination therapy with the polymer-conjugated hyaluronan-degrading enzymes herein for treating or reducing insulin resistance. Such agents include, but are not limited to, metformin (Glucophage), rosiglitazone (Avandia), pioglitazone (Actos) and troglitazone (Rezulin), and D-chiro-inositol. Such drugs can be used in combination therapy for ameliorating or reducing insulin resistance, or for preventing or reducing a disease or condition associated with insulin resistance accompanied by dyslipidemia, hyperinsulinemia, hypertension and/or atherosclerosis. Exemplary of such diseases and conditions include, but are not limited to T2DM, CVD and PCOS.

[0494] In other examples, for treatment of cardiovascular disease associated with insulin resistance, the methods provided herein of administering a polymer-conjugated hyaluronan-degrading enzyme for reducing insulin resistance or preventing or ameliorating diseases or conditions associated with insulin resistance, can further include treatment with a lipid-lowering drugs or anti-hypertensive agents. For example, treatment of blood pressure, and blood triglyceride levels can be controlled by a variety of available drugs, including but not limited to cholesterol modulating drugs or aspirin therapy. Cholesterol or lipid lowering drugs include, but are not limited to, statins (e.g. atorvastatin (Lipitor®), pravastatin (Pravachol®), lovastatin (Altoprev® and Mevacor®), fluvastatin (Lescol®), simivastatin (Zicor®) and rosuvastatin (Crestor®); resins (e.g. L-Cholest, cholestyramine (Prevalite® and Questran®), colesevelam (Welchol®) and colestipol (Colestid®); cholesterol absorption inhibitors (e.g. ezetimibe (Zetia®), simvastatin and ezetimibe combined (Vytorin®)); fibrates (e.g. fenofibrate (Tricor®), bezabifrate (Bezalip®), gemifibrozil (Lopid®)); and nicotinic acid (e.g. niacin).

[0495] Anti-hypertensive agents that can be used in combination therapy herein include, but are not limited to, agents acting on the renin-angiotensin system (e.g. renin inhibitors or Angiotensin II receptor antagonists), adrenergic receptor antagonists (e.g. alpha blockers, beta blockers or combinations thereof), calcium channel blockers (e.g. dihydropyridines or non-dihydropyridine), diuretics, ACE inhibitors, aldosterone antagonists, vasodilators and alpha-2 agonists. Exemplary of such agents include, but are not limited to, bumetanide, ethacrynic acid, furosemide, torsemide, epitizide, hydrochlorothiazide, chlorothiazide, bendroflumethiazide, indapamide, chlorthalidone, metolazone, amiloride, triamterene, spironolactone, atenolol, metoprolol, nadolol, oxprenolol, pindolol, propranolol, timolol, doxazosin, phentolamine, indoramin, phenoxybenzamine, prazosin, terazosin, tolazoline, bucindolol, carvedilol, labetalol, amlodipine, felodipine, isradipine, lercanidipine, nicardipine, nifedipine, nimodipine, nitrendipine, diltiazem, verapamil, captopril, enalapril, fosinopril, lisinopril, perindopril, quinapril, ramipril, trandolapril, benazepril, candesartan, eprosartan, irbesartan, losartan, olmesartan, telmisartan, valsartan, eplerenone, spironolactone, sodium nitroprusside, hydralazine, clonidine, guanabenz, methyldopa, moxonidine, guanethidine, and reserpine. Combination therapy also can include treatment with a conjugated linoleic acid (CLA).

[0496] If insulin resistance leads to T2DM, there are many treatments available for this disease. Exemplary combination agents are hypoglycemic drugs. Typically, treatment of T2DM includes insulin treatment. The insulin can be a intermediate insulin, long-acting insulin (e.g. insulin detemir (Levemir®), insulin glargine (Lantus®)) or a rapid-acting insulin analog (e.g. insulin lispro (Humalog®), insulin aspart (NovoLog®), insulin glulisine (Apidra®)). In particular examples, the insulin is a super-fast acting insulin composition (e.g. U.S. Published Patent Appl. No. US20090304665). Since T2DM patients are resistant to insulin, high doses can be required.

[0497] Other exemplary agents, for example for treatment of T2DM, include, but are not limited to, agents to augment insulin secretion, such as sulfonylureas; agents that bind to the IGF-1 receptor or insulin receptor (IR), such as IGF-1; agents that improve insulin sensitivity, such as a biguanide (e.g. metformin), a thiazolidinedione (e.g. troglitazone), vandate or vanadium salts and phenyloin. Other agents include, but are not limited to, sitagliptin (Januvia®), saxagliptin (Onglyza®), repaglinide (Prandin®), nateglinide (Starlix®), Exenatide (Byetta®) and liraglutide (Victoza®). In addition, other therapeutic agents that exert hypoglycemic activity include, for example, nutraceuticals or other natural health products including, but not limited to, buckwheat, magnesium supplementation, chromium picolinate, Caiapo (white sweet potato extract), flaxseed extract, American ginseng, oat bran, oat gum and vanadium.

[0498] In further examples of insulin resistance associated with polycystic ovary syndrome (PCOS), combination treatments include, but are not limited to, ovulation medications (e.g. clomiphene, letrozole, Follistime, Gonal-F), anti-androgen medications (e.g. birth control pills, spironolactone, flutamide or finasteride), ovarian drilling surgery and in vitro fertilization (IVF)

[0499] b. Corticosteroids

[0500] The polymer-conjugated hyaluronan-degrading enzyme compositions provided herein can be used alone or in further combination with one or more corticosteroids. A corticosteroid is administered in an amount that is therapeutically effective to ameliorate or reduce one or more adverse effects of administration of a polymer-conjugated hyaluronan-degrading enzymes or other agent, in particular, adverse musculoskeletal effects. A therapeutically effective amount is the dosage sufficient to ameliorate, prevent, eliminate or reduce one or more symptoms or adverse effects. Indicators of improvement or successful pretreatment include determination of the failure to manifest a relevant score on the CTCAE scale or a change in grading or severity on the CTCAE scale.

[0501] Corticosteroids are a class of steroid hormones that are produced in the adrenal cortex. Corticosteroids are involved in a wide range of physiologic systems such as stress response, immune response and regulation of inflammation, carbohydrate metabolism, protein catabolism, blood electrolyte levels, and behavior. These include glucocorticoids, which are anti-inflammatory agents with a large number of other functions and mineralocorticoids, which control salt and water balance primarily through action on the kidneys.

[0502] Glucocorticoids are a class of steroid hormones, e.g. corticosteroids, that bind to the glucocorticoid receptor. Glucocorticoids cause their effects by binding to the glucocorticoid receptor. The activated glucocorticoid complex in turn up-regulates the expression of anti-inflammatory proteins in the nucleus and represses the expression of pro-inflammatory proteins in the cytosol by preventing the translocation of other transcription factors from the cytosol into the nucleus.

[0503] Generally, any corticosteroid, e.g. glucocorticoid, can be used in the methods or combinations provided herein. The glucocorticoids include synthetic and non-synthetic glucocorticoids. Exemplary glucocorticoids include, but are not limited to: alclomethasones, algestones, beclomethasones (e.g. beclomethasone dipropionate), betamethasones (e.g. betamethasone 17-valerate, betamethasone sodium acetate, betamethasone sodium phosphate, betamethasone valerate), budesonides, clobetasols (e.g. clobetasol propionate), clobetasones, clocortolones (e.g. clocortolone pivalate), cloprednols, corticosterones, cortisones and hydrocortisones (e.g. hydrocortisone acetate), cortivazols, deflazacorts, desonides, desoximethasones, dexamethasones (e.g. dexamethasone 21-phosphate, dexamethasone acetate, dexamethasone sodium phosphate), diflorasones (e.g. diflorasone diacetate), diflucortolones, difluprednates, enoxolones, fluazacorts, flucloronides, fludrocortisones (e.g. fludrocortisone acetate), flumethasones (e.g. flumethasone pivalate), flunisolides, fluocinolones (e.g. fluocinolone acetonide), fluocinonides, fluocortins, fluocortolones, fluorometholones (e.g. fluorometholone acetate), fluperolones (e.g. fluperolone acetate), fluprednidenes, fluprednisolones, flurandrenolides, fluticasones (e.g. fluticasone propionate), formocortals, halcinonides, halobetasols, halometasones, halopredones, hydrocortamates, hydrocortisones (e.g. hydrocortisone 21-butyrate, hydrocortisone aceponate, hydrocortisone acetate, hydrocortisone buteprate, hydrocortisone butyrate, hydrocortisone cypionate, hydrocortisone hemisuccinate, hydrocortisone probutate, hydrocortisone sodium phosphate, hydrocortisone sodium succinate, hydrocortisone valerate), loteprednol etabonate, mazipredones, medrysones, meprednisones, methylprednisolones (methylprednisolone aceponate, methylprednisolone acetate, methylprednisolone hemisuccinate, methylprednisolone sodium succinate), mometasones (e.g. mometasone furoate), paramethasones (e.g. paramethasone acetate), prednicarbates, prednisolones (e.g. prednisolone 25-diethylaminoacetate, prednisolone sodium phosphate, prednisolone 21-hemisuccinate, prednisolone acetate; prednisolone farnesylate, prednisolone hemisuccinate, prednisolone-21 (beta-D-glucuronide), prednisolone metasulphobenzoate, prednisolone steaglate, prednisolone tebutate, prednisolone tetrahydrophthalate), prednisones, prednivals, prednylidenes, rimexolones, tixocortols, triamcinolones (e.g. triamcinolone acetonide, triamcinolone benetonide, triamcinolone hexacetonide, triamcinolone acetonide 21-palmitate, triamcinolone diacetate). These glucocorticoids and the salts thereof are discussed in detail, for example, in Remington's Pharmaceutical Sciences, A. Osol, ed., Mack Pub. Co., Easton, Pa. (16th ed. 1980).

[0504] In some examples, the glucocorticoid is selected from among cortisones, dexamethasones, hydrocortisones, methylprednisolones, prednisolones and prednisones. In a particular example, the glucocorticoid is dexamethasone.

[0505] The corticosteroid is provided in a therapeutically effective dose. Therapeutically effective concentration can be determined empirically by testing in known in vitro or in vivo (e.g. animal model) systems. For example, the amount of a selected corticosteroid to be administered to ameliorate the adverse effects can be determined by standard clinical techniques. In addition, animal models can be employed to help identify optimal dosage ranges. The precise dosage, which can be determined empirically, can depend on the particular therapeutic preparation, the regime and dosing schedule, the route of administration and the seriousness of the disease.

[0506] The concentration of a selected therapeutic agent in the composition depends on absorption, inactivation and excretion rates, the physicochemical characteristics, the dosage schedule, and amount administered as well as other factors known to those of skill in the art. For example, it is understood that the precise dosage and duration of treatment is a function of the disease or condition, the tissue being treated, the patient or subject and the particular polymer-conjugated hyaluronan-degrading enzyme, including amount and dosage regime. The dose of the corticosteroid also can vary depending on the age and health of the patient, the polymer-conjugated hyaluronan-degrading enzyme dosing (e.g. PEGylated hyaluronan-degrading enzyme dosing), potency of the corticosteroid, and the route of administration. For example, it is to be noted that concentrations and dosage values will vary with the therapeutic dose and dosage regime of the hyaluronan-degrading enzyme. Additionally, the corticosteroid can be administered daily, weekly, or monthly or over longer periods of time in order to achieve the desired results. The particular dosage volume can vary and is dependent on the dosage regime, frequency of administration and the desired rate of administration. It is to be noted that concentrations and dosage values can also vary with the age of the individual treated.

[0507] The precise dosage and duration of treatment can be determined empirically using known testing protocols or by extrapolation from in vivo or in vitro test data. It is to be further understood that for any particular subject, specific dosage regimens should be adjusted over time according to the individual need and the professional judgment of the person administering or supervising the administration of the formulations, and that the concentration ranges set forth herein are exemplary only and are not intended to limit the scope thereof. Generally, dosage regimens are chosen to limit toxicity, and herein are chosen to ameliorate adverse side effects. It should be noted that the attending physician would know how to and when to terminate, interrupt or adjust therapy to lower dosage due to toxicity, or bone marrow, liver or kidney or other tissue dysfunctions. Conversely, the attending physician would also know how to and when to adjust treatment to higher levels if the clinical response is not adequate (precluding toxic side effects). Administration of a therapeutic agent should not exceed the maximum dosage levels established by the United States Food and Drug Administration or published in the Physician's Desk Reference.

[0508] Generally, the dose of corticosteroid administered is dependent upon the specific corticosteroid, as a difference in potency exists between different corticosteroids (see Table 4 below). The corticosteroid, or glucocorticoid, for example dexamethasone, can be given orally (tablets, liquid or liquid concentrate) PO, intravenously (IV) or intramuscularly. The corticosteroid is typically administered as a bolus, but many be administered over a period of time, as long as the dose is effective to ameliorate one or more side effects associated with administration of the polymer-conjugated hyaluronan-degrading enzyme, for example, a PEGylated hyaluronidase.

TABLE 4
Glucocorticoid administration

| Glucocorticoid (route) | Equivalent Potency (mg) |
|---|---|
| Hydrocortisone (IV or PO) | 20 |
| Prednisone | 5 |
| Prednisolone (IV or PO) | 5 |
| Methylprednisolone sodium succinate (IV) | 4 |
| Dexamethasone (IV or PO) | 0.5-0.75 |

[0509] The corticosteroid can be administered in any amount that is effective to ameliorate one or more side effects associated with administration of the polymer-conjugated hyaluronan-degrading enzyme. Thus, the corticosteroid, e.g. glucocorticoid, can be administered, for example, at an amount between at or about 0.1 and 100 mgs, per dose, 0.1 to 80 mgs, 0.1 to 60 mgs, 0.1 to 40 mgs, 0.1 to 30 mgs, 0.1 to 20 mgs, 0.1 to 15 mgs, 0.1 to 10 mgs, 0.1 to 5 mgs, 0.2 to 40 mgs, 0.2 to 30 mgs, 0.2 to 20 mgs, 0.2 to 15 mgs, 0.2 to 10 mgs, 0.2 to 5 mgs, 0.4 to 40 mgs, 0.4 to 30 mgs, 0.4 to 20 mgs, 0.4 to 15 mgs, 0.4 to 10 mgs, 0.4 to 5 mgs, 0.4 to 4 mgs, 1 to 20 mgs, 1 to 15 mgs or 1 to 10 mgs, to a 70 kg adult human subject. Typically, the corticosteroid, such as a glucocorticoid is administered at an amount between at or about 0.4 and 20 mgs, for example, at or about or at least 0.4 mgs, 0.5 mgs, 0.6 mgs, 0.7 mgs, 0.75 mgs, 0.8 mgs, 0.9 mgs, 1 mg, 2 mgs, 3 mgs, 4 mgs, 5 mgs, 6 mgs, 7 mgs, 8 mgs, 9 mgs, 10 mgs, 11 mgs, 12 mgs, 13 mgs, 14 mgs, 15 mgs, 16 mgs, 17 mgs, 18 mgs, 19 mgs or 20 mgs per dose, to an average adult human subject.

[0510] The corticosteroid can be administered, for example, at a dosage of at or about or at least 0.001 mg/kg (of the subject), 0.002 mg/kg, 0.003 mg/kg, 0.004 mg/kg, 0.005 mg/kg, 0.006 mg/kg, 0.007 mg/kg, 0.008 mg/kg, 0.009 mg/kg, 0.01 mg/kg, 0.015 mg/kg, 0.02 mg/kg, 0.025 mg/kg, 0.03 mg/kg, 0.035 mg/kg, 0.04 mg/kg, 0.045 mg/kg, 0.05 mg/kg, 0.055 mg/kg, 0.06 mg/kg, 0.065 mg/kg, 0.07 mg/kg, 0.075 mg/kg, 0.08 mg/kg, 0.085 mg/kg, 0.09 mg/kg, 0.095 mg/kg, 0.1 mg/kg, 0.15 mg/kg, 0.2 mg/kg, 0.25 mg/kg, 0.30 mg/kg, 0.35 mg/kg, 0.40 mg/kg, 0.45 mg/kg, 0.50 mg/kg, 0.55 mg/kg, 0.60 mg/kg, 0.65 mg/kg, 0.70 mg/kg, 0.75 mg/kg, 0.80 mg/kg, 0.85 mg/kg, 0.90 mg/kg, 0.95 mg/kg, 1 mg/kg, 1.05 mg/kg, 1.1 mg/kg, 1.15 mg/kg, 1.20 mg/kg, 1.25 mg/kg, 1.3 mg/kg, 1.35 mg/kg or 1.4 mg/kg, to an average adult human subject, typically weighing about 70 kg to 75 kg.

[0511] The dosage administered administration can vary as long as administration of the corticosteroid ameliorates one or more adverse side effects associated with administration of the polymer-conjugated hyaluronan-degrading enzyme. In one example, the dosage of glucocorticoid, for example, dexamethasone, is adminstered in successively lower dosages per treatment cycle. Hence, in such treatment regimes, the dose of corticosteroid is tapered. For example, dexamethasone is administered prior to administration of a polymer-conjugated hyaluronan-degrading enzyme, at an initial dose of 4 mg, and upon each successive administration of the hyaluronan-dergrading enzyme, the dexamethasone dose is lowered, such that the dose is 3 mg for the next administration of the hyaluronan-degrading enzyme, e.g. PEGylated hyaluronidase, then 2 mg per administration of anti-hyaluronan agent, e.g. PEGylated hyaluronidase, and then 1 mg per administration of anti-hyaluronan agent, e.g. PEGylated hyaluronidase. Any dose is contemplated as long as the dose of the corticosteroid is effective to reduce one or more side effects associated with administration of the hyaluronan-degrading enzyme, e.g. a PEGylated hyaluronidase.

[0512] Time of administration can vary as long as administration of the corticosteroid ameliorates one or more adverse side effects associated with administration of the hyaluronan-degrading enzyme, such as a PEGylated hyaluronidase. The corticosteroid can be administered sequentially, intermittently, at the same time or in the same composition as hyaluronan-degrading enzyme, e.g. PEGylated hyaluronan-degrading enzyme. For example, the corticosteroid can be administered before, during, simultaneously with, or after administration of the hyaluronan-degrading enzyme, e.g. PEGylated hyaluronidase. In another example, the corticosteroid and hyaluronan-degrading enzyme, e.g. PEGylated hyaluronidase are administered intermittently. Generally, the corticosteroid is administered prior to administration of the hyaluronan-degrading enzyme, e.g. PEGylated hyaluronidase. For example, the corticosteroid, e.g. glucocorticoid, such as dexamethasone, can be administered at or about 0.5 minutes, 1 minute, 2 minutes, 3 minutes, 4 minutes, 5 minutes, 6 minutes, 7 minutes, 8 minutes, 9 minutes, 10 minutes, 15 minutes, 20 minutes, 25 minutes, 30 minutes, 45 minutes, 1 hour, 2 hours, 3 hours, 4 hours, 5 hours, 6 hours, 7 hours, 8 hours, 9 hours, 10 hours, 11 hours, 12 hours, 18 hours, 24 hours, 36 hours or more prior to administration of the anti-hyaluronan agent, for example a PEGylated hyaluronan-degrading enzyme.

[0513] In some examples, the corticosteroid is administered at the same time as administration of the polymer-conjugated hyaluronan-degrading enzyme, for example a PEGylated hyaluronan-degrading enzyme. In this example, the corticosteroid can be administered together with, or separately from, the hyaluronan-degrading enzyme, e.g. a PEGylated hyaluronidase. Typically, the corticosteroid is administered separately from the hyaluronan-degrading enzyme, for example a PEGylated hyaluronan-degrading enzyme. In other examples, the corticosteroid is administered at or about 0.5 minutes, 1 minute, 2 minutes, 3 minutes, 4 minutes, 5 minutes, 6 minutes, 7 minutes, 8 minutes, 9 minutes, 10 minutes, 15 minutes, 20 minutes, 25 minutes, 30 minutes, 45 minutes, 1 hour, 2 hours, 3 hours, 4 hours, 5 hours, 6 hours, 7 hours, 8 hours, 9 hours, 10 hours, 11 hours, 12 hours, 18 hours, 24 hours, 36 hours or more after administration of the hyaluronan-degrading enzyme, for example a PEGylated hyaluronan-degrading enzyme.

[0514] In one example, the corticosteroid is administered prior to administration of a polymer-conjugated hyaluronan-degrading enzyme, for example a PEGylated hyaluronidase. For example, the corticosteroid, e.g. glucocorticoid, for example, dexamethasone, is administered 1 hour prior to the administration of the hyaluronan-degrading enzyme, e.g. a PEGylated hyaluronidase. In another example, the corticosteroid is administered 5 minutes before the administration of the hyaluronan-degrading enzyme, e.g. a PEGylated hyaluronan-degrading enzyme. In another example, the corticosteroid is administered both prior to and after the administration of hyaluronan-degrading enzyme, e.g. a PEGylated hyaluronidase. In this example, the corticosteroid, such as dexamethasone, is administered one to five minutes immediately before administration of the polymer-conjugated hyaluronan-degrading enzyme, e.g. a PEGylated hyaluronan-degrading enzyme and eight hours after administration of the anti-hyaluronan agent, e.g. a PEGylated hyaluronan-degrading enzyme. In another example, a corticosteroid, such as dexamethasone, is administered one hour before administration of the hyaluronan-degrading enzyme, e.g. a PEGylated hyaluronan-degrading enzyme and eight to twelve hours after administration of the anti-hyaluronan agent, e.g. a PEGylated hyaluronan-degrading enzyme.

[0515] Any dosing regime is contemplated as long as the time of dosing of the corticosteroid ameliorates the one or more side effects associated with administration of the hyaluronan-degrading enzyme, for example a PEGylated hyaluronidase. In addition, the dose or dosing regime of corticosteroid is one that does not interfere or reduce the therapeutic effect of the polymer-conjugated hyaluronan-degrading enzyme in the methods provided herein, including in reducing or ameliorating insulin resistance or preventing or ameliorating a metabolic syndrome associated with insulin resistance.

### H. EXAMPLES

[0516] The following examples are included for illustrative purposes only and are not intended to limit the scope of the invention.

### Example 1

### Measurement of Hyaluronic Acid Content in Skeletal Muscle of Obese Mice

[0517] High-fat (HF) diet-induced obese (D10) mice were used as a model of skeletal muscle insulin resistance (Surwit et al. (1988) Diabetes 37:1163-1167). The effect of a high fat diet on the hyaluronic acid (HA) content of the extracellular matrix (ECM) of the skeletal muscle of male C57/BL6J mice was assessed. Male C57/BL6J mice were purchased from the Jackson Laboratory (Bar Harbor, Me.) and housed under temperature and humidity-controlled environmental conditions with a 12 hour light/dark cycle. All animal procedures were approved by the Vanderbilt Animal Care and Use Committee.

[0518] Mice were fed either a regular rodent chow (Purina) diet or a high fat (HF) diet containing 60% calories as fat (F3282, BioServ, Frenchtown, N.J.) in order to induce obesity. After maintaining the diet for 20 weeks, the mice were sacrificed following a 5-hour fast after the last feeding. The gastrocnemius were collected and the HA content was assessed by immunohistochemistry.

[0519] Immunohistochemistry was performed to assess HA content. Briefly, paraffin-embedded tissue sections (5 μm) were incubated for overnight at 4° C. with a primary antibody, biotinylated HA-binding protein (B-HABP, Catalog No. 400763-1A, Seikagaku, East Falmouth, Mass.), as a probe for HA detection and digital quantification. After washing to remove primary reagent, samples were incubated with a streptavidin-horseradish peroxidase (HRP) solution for 30 minutes, lightly counterstained with Mayer's hematoxylin, and detected with 3,3′-diaminobenzidine (DAB) using EnVision+HRP/DAB System (DakoCytomation, Carpenteria, Calif.) to produce localized, visible staining according to the manufacturer's instructions. The images were captured using a Q-Imaging Micropublisher camera (Surrey, BC, Canada) mounted on an Olympus upright microscope (Tokyo, Japan) and immunostaining was quantified by ImageJ Software (developed by the National Institute of Health). HA expression was measured by the integrated intensity of staining. The data were normalized to HA content in mice that were fed regular rodent chow.

[0520] The immunohistochemical stains showed a 2-fold increase in the HA content in the skeletal muscle of the mice fed for 20 weeks with a HF diet (n=6; p<0.05) as compared to the mice that were fed regular rodent chow (n=5), indicating that induced obesity increases the HA content in the ECM of insulin resistant mouse skeletal muscle.

### Example 2

### PH20-Expressing Cell Lines and Expression

### A. Generation of an Initial Soluble PH20-Expressing Cell Line

[0521] Chinese Hamster Ovary (CHO) cells were transfected with the HZ24 plasmid (set forth in SEQ ID NO:52). The HZ24 plasmid vector for expression of soluble

[0522] PH20 contains a pCI vector backbone (Promega), DNA encoding amino acids 1-482 of human PH20 hyaluronidase (SEQ ID NO:49), an internal ribosomal entry site (IRES) from the ECMV virus (Clontech), and the mouse dihydrofolate reductase (DHFR) gene. The pCI vector backbone also includes DNA encoding the Beta-lactamase resistance gene (AmpR), an f1 origin of replication, a Cytomegalovirus immediate-early enhancer/promoter region (CMV), a chimeric intron, and an SV40 late polyadenylation signal (SV40). The DNA encoding the soluble PH20 construct contains an NheI site and a Kozak consensus sequence prior to the DNA encoding the methionine at amino acid position 1 of the native 35 amino acid signal sequence of human PH20, and a stop codon following the DNA encoding the tyrosine corresponding to amino acid position 482 of the human PH20 hyaluronidase set forth in SEQ ID NO:1, followed by a BamHI restriction site. The construct pCI-PH20-IRES-DHFR-SV40pa (HZ24), therefore, results in an mRNA species driven by the CMV promoter that encodes amino acids 1-482 of human PH20 (set forth in SEQ ID NO:3) and amino acids 1-186 of mouse dihydrofolate reductase (set forth in SEQ ID NO:53) separated by the internal ribosomal entry site (IRES).

[0523] Non-transfected CHO cells growing in GIBCO Modified CD-CHO media for DHFR(−) cells, supplemented with 4 mM glutamine and 18 ml/L Plurionic F68/L (Gibco), were seeded at 0.5×10⁶ cells/mL in a shaker flask in preparation for transfection. Cells were grown at 37° C. in 5% CO₂ in a humidified incubator, shaking at 120 rpm. Exponentially growing non-transfected CHO cells were tested for viability prior to transfection.

[0524] Sixty million viable cells of the non-transfected CHO cell culture were pelleted and re-suspended to a density of 2×10⁷ cells in 0.7 mL of 2×transfection buffer (2×HeBS: 40 mM Hepes, pH 7.0, 274 mM NaCl, 10 mM KCl, 1.4 mM Na₂HPO₄, 12 mM dextrose). To each aliquot of re-suspended cells, 0.09 mL (250 μg) of the linear HZ24 plasmid (linearized by overnight digestion with Cla I (New England Biolabs) was added, and the cell/DNA solutions were transferred into 0.4 cm gap BTX (Gentronics) electroporation cuvettes at room temperature. A negative control electroporation was performed with no plasmid DNA mixed with the cells. The cell/plasmid mixes were electroporated with a capacitor discharge of either 330 V and 960 μF or 350 V and 960 μF.

[0525] The cells were removed from the cuvettes after electroporation and transferred into 5 mL of Modified CD-CHO media for DHFR(−) cells, supplemented with 4 mM glutamine and 18 mL/L Plurionic F68/L (Gibco), and allowed to grow in a well of a 6-well tissue culture plate without selection for 2 days at 37° C. in 5% CO₂ in a humidified incubator.

[0526] Two days post-electroporation, 0.5 mL of tissue culture media was removed from each well and tested for the presence of hyaluronidase activity using the microturbidity assay described in Example 4. Cells expressing the highest levels of hyaluronidase activity were collected from the tissue culture well, counted and diluted to 1×10⁴ to 2×10⁴ viable cells per mL. A 0.1 mL aliquot of the cell suspension was transferred to each well of five, 96-well round bottom tissue culture plates. One hundred microliters of CD-CHO media (GIBCO) containing 4 mM GlutaMAX™-1 supplement (GIBCO™, Invitrogen Corporation) and without hypoxanthine and thymidine supplements were added to the wells containing cells (final volume 0.2 mL).

[0527] Ten clones were identified from the 5 plates grown without methotrexate. Six of these HZ24 clones were expanded in culture and transferred into shaker flasks as single cell suspensions. Clones 3D3, 3E5, 2G8, 2D9, 1E11, and 4D10 were plated into 96-well round bottom tissue culture plates using a two-dimensional infinite dilution strategy in which cells were diluted 1:2 down the plate, and 1:3 across the plate, starting at 5000 cells in the top left hand well. Diluted clones were grown in a background of 500 non-transfected DG44 CHO cells per well, to provide necessary growth factors for the initial days in culture. Ten plates were made per subclone, with 5 plates containing 50 nM methotrexate and 5 plates without methotrexate.

[0528] Clone 3D3 produced 24 visual subclones (13 from the no methotrexate treatment, and 11 from the 50 nM methotrexate treatment). Significant hyaluronidase activity was measured in the supernatants from 8 of the 24 subclones (>50 Units/mL), and these 8 subclones were expanded into T-25 tissue culture flasks. Clones isolated from the methotrexate treatment protocol were expanded in the presence of 50 nM methotrexate. Clone 3D35M was further expanded in 500 nM methotrexate in shaker flasks and gave rise to clones producing in excess of 1,000 Units/mL hyaluronidase activity (clone 3D35M; or Gen1 3D35M). A master cell bank (MCB) of the 3D35M cells was then prepared.

B. Generation of a Second Generation Cell Line Expressing Soluble rHuPH20

[0529] The Gen1 3D35M cell line described in Example 2A was adapted to higher methotrexate levels to produce generation 2 (Gen2) clones. 3D35M cells were seeded from established methotrexate-containing cultures into CD CHO medium containing 4 mM GlutaMAX-1™ and 1.0 μM methotrexate. The cells were adapted to a higher methotrexate level by growing and passaging the cells 9 times over a period of 46 days in a 37° C., 7% CO₂-humidified incubator. The amplified population of cells was cloned out by limiting dilution in 96-well tissue culture plates containing medium with 2.0 μM methotrexate. After approximately 4 weeks, clones were identified and clone 3E10B was selected for expansion. 3EIOB cells were grown in CD CHO medium containing 4 mM GlutaMAX-1™ and 2.0 μM methotrexate for 20 passages. A master cell bank (MCB) of the 3E10B cell line was created and frozen and used for subsequent studies.

[0530] Amplification of the cell line continued by culturing 3EIOB cells in CD CHO medium containing 4 mM GlutaMAX-1™ and 4.0 μM methotrexate. After the 12^{th} passage, cells were frozen in vials as a research cell bank (RCB). One vial of the RCB was thawed and cultured in medium containing 8.0 μM methotrexate. After 5 days, the methotrexate concentration in the medium was increased to 16.0 μM, then 20.0 μM 18 days later. Cells from the 8^{th} passage in medium containing 20.0 μM methotrexate were cloned out by limiting dilution in 96-well tissue culture plates containing CD CHO medium containing 4 mM GlutaMAX-1™ and 20.0 μM methotrexate. Clones were identified 5-6 weeks later and clone 2B2 was selected for expansion in medium containing 20.0 μM methotrexate. After the 11th passage, 2B2 cells were frozen in vials as a research cell bank (RCB).

[0531] The resultant 2B2 cells are dihydrofolate reductase deficient (dhfr-) DG44 CHO cells that express soluble recombinant human PH20 (rHuPH20). The soluble PH20 is present in 2B2 cells at a copy number of approximately 206 copies/cell. Southern blot analysis of Spe I-, Xba I- and BamH I/Hind III-digested genomic 2B2 cell DNA using a PH20-specific probe revealed the following restriction digest profile: one major hybridizing band of ˜7.7 kb and four minor hybridizing bands (˜13.9, ˜6.6, ˜5.7 and ˜4.6 kb) with DNA digested with Spe I; one major hybridizing band of ˜5.0 kb and two minor hybridizing bands (˜13.9 and ˜6.5 kb) with DNA digested with Xba I; and one single hybridizing band of ˜1.4 kb observed using 2B2 DNA digested with BamH I/Hind III. Sequence analysis of the mRNA transcript indicated that the derived cDNA (SEQ ID NO:56) was identical to the reference sequence (SEQ ID NO:49) except for one base pair difference at position 1131, which was observed to be a thymidine (T) instead of the expected cytosine (C). This is a silent mutation, with no effect on the amino acid sequence.

### Example 3

### Production and Purification of Recombinant Human PH20 (rHuPH20)

### A. Production of Gen2-Soluble PH20 in 300 L Bioreactor Cell Culture

[0532] A vial of HZ24-2B2 cells (Example 2B) was thawed and expanded from shaker flasks through 36 L spinner flasks in CD-CHO media (Invitrogen, Carlsbad, Calif.) supplemented with 20 μM methotrexate and GlutaMAX-1™ (Invitrogen). Briefly, a vial of cells was thawed in a 37° C. water bath, media was added, and the cells were centrifuged. The cells were re-suspended in a 125 mL shake flask with 20 mL of fresh media and placed in a 37° C., 7% CO₂ incubator. The cells were expanded up to 40 mL in the 125 mL shake flask. When the cell density reached greater than 1.5×10⁶ cells/mL, the culture was expanded into a 125 mL spinner flask in a 100 mL culture volume. The flask was incubated at 37° C., 7% CO₂. When the cell density reached greater than 1.5×10⁶ cells/mL, the culture was expanded into a 250 mL spinner flask in 200 mL culture volume, and the flask was incubated at 37° C., 7% CO₂. When the cell density reached greater than 1.5×10⁶ cells/mL, the culture was expanded into a 1 L spinner flask in 800 mL culture volume and incubated at 37° C., 7% CO₂. When the cell density reached greater than 1.5×10⁶ cells/mL the culture was expanded into a 6 L spinner flask in 5000 mL culture volume and incubated at 37° C., 7% CO₂. When the cell density reached greater than 1.5×106 cells/mL the culture was expanded into a 36 L spinner flask in 32 L culture volume and incubated at 37° C., 7% CO₂.

[0533] A 400 L reactor was sterilized and 230 mL of CD-CHO media was added. Before use, the reactor was checked for contamination. Approximately 30 L cells were transferred from the 36 L spinner flasks to the 400 L bioreactor (Braun) at an inoculation density of 4.0×10⁵ viable cells per mL and a total volume of 260 L. Parameters were: temperature set point, 37° C.; impeller speed, 40-55 RPM; vessel pressure, 3 psi; air sparge, 0.5-1.5 L/min.; air overlay, 3 L/min. The reactor was sampled daily for cell counts, pH verification, media analysis, protein production and retention. Also, during the run, nutrient feeds were added. At 120 hrs (day 5), 10.4 L of Feed #1 Medium (4×CD-CHO+33 g/L glucose+160 mL/L Glutamax-1™+83 mL/L Yeastolate+33 mg/L rHulnsulin) was added. At 168 hours (day 7), 10.8 L of Feed #2 Medium (2×CD-CHO+33 g/L glucose+80 mL/L Glutamax-1™+167 mL/L Yeastolate+0.92 g/L sodium butyrate) was added, and culture temperature was changed to 36.5° C. At 216 hours (day 9), 10.8 L of Feed #3 Medium (1×CD-CHO+50 g/L Glucose+50 mL/L Glutamax-1™+250 mL/L Yeastolate+1.80 g/L sodium butyrate) was added, and culture temperature was changed to 36° C. At 264 hours (day 11), 10.8 L of Feed #4 Medium (lx CD-CHO+33 g/L glucose+33 mL/L Glutamax-1™+250 mL/L Yeastolate+0.92 g/L sodium butyrate) was added, and culture temperature was changed to 35.5° C. The addition of the feed media was observed to dramatically enhance the production of soluble rHuPH20 in the final stages of production. The reactor was harvested at 14 or 15 days or when the viability of the cells dropped below 40%. The process resulted in a final productivity of 17,000 Units/mL, with a maximal cell density of 12 million cells/mL. At harvest, the culture was sampled for mycoplasma, bioburden, endotoxin and viral in vitro and in vivo, Transmission Electron Microscopy (TEM) and enzyme activity.

[0534] The culture was pumped by a peristaltic pump through four Millistak filtration system modules (Millipore) in parallel, each containing a layer of diatomaceous earth graded to 4-8 μm and a layer of diatomaceous earth graded to 1.4-1.1 μm, followed by a cellulose membrane, then through a second single Millistak filtration system (Millipore) containing a layer of diatomaceous earth graded to 0.4-0.11 μm and a layer of diatomaceous earth graded to <0.1 μm, followed by a cellulose membrane, and then through a 0.22 μm final filter into a sterile single-use flexible bag with a 350 L capacity. The harvested cell culture fluid was supplemented with 10 mM EDTA and 10 mM Tris to a pH of 7.5. The culture was concentrated 10× with a tangential flow filtration (TFF) apparatus using four Sartoslice TFF 30 kDa molecular weight cut-off (MWCO) polyether sulfone (PES) filters (Sartorius), followed by a 10× buffer exchange with 10 mM Tris, 20 mM Na₂SO₄, pH 7.5, through a 0.22 μm final filter into a 50 L sterile storage bag.

[0535] The concentrated, diafiltered harvest was inactivated for virus. Prior to viral inactivation, a solution of 10% Triton X-100, 3% tri (n-butyl) phosphate (TNBP) was prepared. The concentrated, diafiltered harvest was exposed to 1% Triton X-100, 0.3% TNBP for 1 hour in a 36 L glass reaction vessel immediately prior to purification on the Q column.

### B. Purification of Gent-Soluble PH20

[0536] A Q Sepharose (Pharmacia) ion exchange column (9 L resin, H=29 cm, D=20 cm) was prepared. Wash samples were collected for a determination of pH, conductivity and endotoxin (LAL) assay. The column was equilibrated with 5 column volumes of 10 mM Tris, 20 mM Na₂SO₄, pH 7.5. Following viral inactivation, the concentrated, diafiltered harvest (Example 3A) was loaded onto the Q column at a flow rate of 100 cm/hr. The column was washed with 5 column volumes of 10 mM Tris, 20 mM Na₂SO₄, pH 7.5 and 10 mM Hepes, 50 mM NaCl, pH 7.0. The protein was eluted with 10 mM Hepes, 400 mM NaCl, pH 7.0, through a 0.22 μm final filter into sterile bag. The eluate sample was tested for bioburden, protein concentration and hyaluronidase activity. A₂₈₀ absorbance readings were taken at the beginning and end of the exchange.

[0537] Phenyl-Sepharose (Pharmacia) hydrophobic interaction chromatography was next performed. A phenyl-Sepharose (PS) column (19-21 L resin, H=29 cm, D=30 cm) was prepared. The wash was collected and sampled for pH, conductivity and endotoxin (LAL assay). The column was equilibrated with 5 column volumes of 5 mM potassium phosphate, 0.5 M ammonium sulfate, and 0.1 mM CaCl₂, pH 7.0. The protein eluate from the Q Sepharose column was supplemented with 2M ammonium sulfate, 1 M potassium phosphate and 1 M CaCl₂ stock solutions to yield final concentrations of 5 mM, 0.5 M and 0.1 mM, respectively. The protein was loaded onto the PS column at a flow rate of 100 cm/hr and the column flow-through collected. The column was washed with 5 mM potassium phosphate, 0.5 M ammonium sulfate and 0.1 mM CaCl₂, pH 7.0 at 100 cm/hr, and the wash was added to the collected flow-through. Combined with the column wash, the flow-through was passed through a 0.22 μm final filter into a sterile bag. The flow-through was sampled for bioburden, protein concentration and enzyme activity.

[0538] An aminophenyl boronate column (ProMedics) was prepared. The wash was collected and sampled for pH, conductivity and endotoxin (LAL assay). The column was equilibrated with 5 column volumes of 5 mM potassium phosphate and 0.5 M ammonium sulfate. The PS flow-through containing purified protein was loaded onto the aminophenyl boronate column at a flow rate of 100 cm/hr. The column was first washed with 5 mM potassium phosphate and 0.5 M ammonium sulfate, pH 7.0. The column was then washed with 20 mM bicine and 0.5 M ammonium sulfate, pH 9.0. The column was further washed with 20 mM bicine and 100 mM sodium chloride, pH 9.0. The protein was eluted with 50 mM Hepes, 100 mM NaCl, pH 6.9, and passed through a sterile filter into a sterile bag. The eluted sample was tested for bioburden, protein concentration and enzyme activity.

[0539] The hydroxyapatite (HAP) column (Biorad) was prepared. The wash was collected and tested for pH, conductivity and endotoxin (LAL assay). The column was equilibrated with 5 mM potassium phosphate, 100 mM NaCl and 0.1 mM CaCl₂, pH 7.0. The aminophenyl boronate-purified protein was supplemented to final concentrations of 5 mM potassium phosphate and 0.1 mM CaCl₂ and loaded onto the HAP column at a flow rate of 100 cm/hr. The column was washed with 5 mM potassium phosphate, pH 7, 100 mM NaCl and 0.1 mM CaCl₂. The column was next washed with 10 mM potassium phosphate, pH 7, 100 mM NaCl, and 0.1 mM CaCl₂. The protein was eluted with 70 mM potassium phosphate, pH 7.0, and passed through a 0.22 μm sterile filter into a sterile bag. The eluted sample was tested for bioburden, protein concentration and enzyme activity.

[0540] The HAP purified protein was then passed through a viral removal filter. The sterilized Viosart filter (Sartorius) was first prepared by washing with 2 L of 70 mM potassium phosphate, pH 7.0. Before use, the filtered buffer was sampled for pH and conductivity. The HAP-purified protein was pumped via a peristaltic pump through the 20 nM viral removal filter. The filtered protein in 70 mM potassium phosphate, pH 7.0, was passed through a 0.22 μm final filter into a sterile bag. The viral filtered sample was tested for protein concentration, enzyme activity, oligosaccharide, monosaccharide and sialic acid profiling. The sample also was tested for process related impurities.

### Example 4

### Determination of Hyaluronidase Activity of PH20

[0541] Hyaluronidase activity of soluble PH20 in samples such as cell cultures, plasma, purification fractions and purified solutions was determined using either a turbidimetric assay, which is based on the formation of an insoluble precipitate when hyaluronic acid binds with serum albumin, or a biotinylated-hyaluronic acid substrate assay, which measures the amount of enzymatically active rHuPH20 or PEGPH20 by the digestion of biotinylated hyaluronic acid (b-HA) substrate non-covalently bound to plastic, multi-well microtiter plates.

### A. Microturbidity Assay

[0542] Hyaluronidase activity of soluble rHuPH20 was measured by incubating soluble rHuPH20 with sodium hyaluronate (hyaluronic acid) for a set period of time (10 minutes) and then the undigested sodium hyaluronate was precipitated by the addition of acidified serum albumin. The turbidity of the resulting sample was measured at 640 nm after a 30 minute development period. The decrease in turbidity resulting from enzyme activity on the sodium hyaluronate substrate is a measure of the soluble rHuPH20 hyaluronidase activity. The method was performed using a calibration curve generated with dilutions of a soluble rHuPH20 assay working reference standard, and sample activity measurements were made relative to this calibration curve.

[0543] Dilutions of the sample were prepared in Enzyme Diluent Solutions. The Enzyme Diluent Solution was prepared by dissolving 33.0±0.05 mg of hydrolyzed gelatin in 25.0 mL of 50 mM PIPES reaction buffer (140 mM NaCl, 50 mM PIPES, pH 5.5) and 25.0 mL of sterile water for injection (SWFI), diluting 0.2 mL of 25% Buminate solution into the mixture, and vortexing for 30 seconds. This was performed within 2 hours of use and stored on ice until needed. The samples were diluted to an estimated 1-2 U/mL. Generally, the maximum dilution per step did not exceed 1:100 and the initial sample size for the first dilution was not less than 20 μL. The minimum sample volumes needed to perform the assay were as follows: in-process samples, FPLC fractions: 80 μL; tissue culture supernatants: 1 mL; concentrated material: 80 μL; purified or final step material: 80 μL. The dilutions were made in triplicate in a low protein binding 96-well plate, and 30 μL of each dilution was transferred to Optilux black/clear bottom plates (BD BioSciences).

[0544] Dilutions of known, soluble rHuPH20 with a concentration of 2.5 U/mL were prepared in Enzyme Diluent Solution to generate a standard curve and added to the Optilux plate in triplicate. The dilutions included 0 U/mL, 0.25 U/mL, 0.5 U/mL, 1.0 U/mL, 1.5 U/mL, 2.0 U/mL, and 2.5 U/mL. “Reagent blank” wells that contained 60 μL of Enzyme Diluent Solution were included in the plate as a negative control. The plate was then covered and warmed on a heat block for 5 minutes at 37° C. The cover was removed and the plate was shaken for 10 seconds. After shaking, the plate was returned to the heat block and the MULTIDROP 384 Liquid Handling Device was primed with the warm 0.25 mg/mL sodium hyaluronate solution (prepared by dissolving 100 mg of sodium hyaluronate (LifeCore Biomedical) in 20.0 mL of SWFI. This was mixed by gently rotating and/or rocking at 2-8° C. for 2-4 hours, or until completely dissolved). The reaction plate was transferred to the MULTIDROP 384 and the reaction was initiated by pressing the start key to dispense 30 μL sodium hyaluronate into each well. The plate was then removed from the MULTIDROP 384 and shaken for 10 seconds before being transferred to a heat block with the plate cover replaced. The plate was incubated at 37° C. for 10 minutes.

[0545] The MULTIDROP 384 was prepared to stop the reaction by priming the machine with Serum Working Solution (25 mL of Serum Stock Solution (1 volume of Horse Serum (Sigma) was diluted with 9 volumes of 500 mM acetate buffer solution and the pH was adjusted to 3.1 with hydrochloric acid) in 75 mL of 500 mM acetate buffer solution) and changing the volume setting to 240 μL. The plate was removed from the heat block and placed onto the MULTIDROP 384, and 240 μL of Serum Working Solution was dispensed into the wells. The plate was removed and shaken on a plate reader for 10 seconds. After a further 15 minutes, the turbidity of the samples was measured at 640 nm and the hyaluronidase activity (in U/mL) of each sample was determined by fitting to the standard curve.

[0546] Specific activity (Units/mg) was calculated by dividing the hyaluronidase activity (U/mL) by the protein concentration (mg/mL).

### B. Biotinylated Hyaluronan Assay

[0547] The biotinylated-hyaluronic acid assay measures the amount of enzymatically active rHuPH20 or PEGPH20 in biological samples by the digestion of a large molecular weight (˜1.2 megadaltons) biotinylated-hyaluronic acid (b-HA) substrate non-covalently bound to plastic, multi-well microtiter plates. The rHuPH20 or PEGPH20 in standards and samples were allowed to incubate in a plate coated with b-HA at 37° C. After a series of washes, remaining uncleaved/bound b-HA was treated with streptavidin horseradish peroxidase conjugate (SA-HRP). Reaction between immobilized SA-HRP and the chromogenic substrate, 3,3′,5,5′-tetramethylbenzidine (TMB), produces a blue colored solution. After stopping the reaction with acid, formation of the soluble yellow reaction product was determined by reading the absorbance at 450 nm using a microtiter plate spectrophotometer. The decrease in absorbance at 450 nm resulting from enzyme activity on the biotinylated-hyaluronic acid (b-HA) substrate is a measure of the soluble rHuPH20 hyaluronidase activity. The method was performed using a calibration curve generated with dilutions of a soluble rHuPH20 or PEGPH20 reference standard, and sample activity measurements were made relative to this calibration curve.

[0548] Dilutions of the sample and calibrator were prepared in Assay Diluent. The Assay Diluent was prepared by adding 1% v/v pooled plasma (from the appropriate species) to 0.1% (w/v) BSA in HEPES, pH 7.4. This was prepared daily and stored at 2-8° C. Depending upon the species type, as well as the anticipated hyaluronidase level, single or multiple dilutions were prepared to ensure at least one sample dilution would fall within the range of the calibration curve. To guide the selection of test sample dilution(s), information known about the dose of hyaluronidase administered, the route of administration, approximate plasma volume of the species and the time point were used to estimate the hyaluronidase activity levels. Each sample dilution was mixed as it was prepared by brief pulse-vortexing, and pipet tips were changed in between each dilution. In general, the dilutions began with an initial 50 or 100-fold dilution, followed by additional serial dilutions. A seven-point calibration curve of rHuPH20 or PEGPH20 (depending upon the treatment administered) was prepared ranging in concentration from 0.004 to 3.0 U/mL for rHuPH20 and from 0.037 to 27 U/mL for PEGPH20. One-hundred microliters (100 μL) of each test sample dilution and calibration curve point was applied to triplicate wells of a 96-well microtiter plate (Immulon 4HBX, Thermo) that had been previously coated with 100 μL per well of b-HA at 0.1 mg/mL and blocked with 250 μL of 1.0% (w/v) bovine serum albumin in PBS. Plate(s) were covered with an adhesive plate seal and incubated at 37° C. for approximately 90 minutes. At the end of the incubation period, the adhesive seal was removed from the plate, samples were aspirated, and the plate was washed five times with 300 μL per well Wash Buffer (10 mM phosphate buffer, 2.7 mM potassium chloride, 137 mM sodium chloride, pH 7.4, with 0.05% (v/v) Tween 20, PBST) using an automated plate washer (BioTek ELx405 Select CW, Program ‘4HBX1’). One hundred microliters of streptavidin-HRP conjugate Working Solution (Streptavidin-HRP conjugate (1:5,000 v/v) in 20 mM Tris-HCl, 137 mM sodium chloride, 0.025% (v/v) Tween 20, 0.1% (w/v) bovine serum albumin) was added per well. The plate was sealed and allowed to incubate at ambient temperature for approximately 60 minutes, protected from light and without shaking. At the end of the incubation period, the adhesive seal was removed from the plate, samples were aspirated and the plate washed five times with 300 μL per well Wash Buffer as described above. TMB solution (at ambient temperature) was added to each well and allowed to incubate, protected from light, for approximately five minutes at room temperature. TMB Stop Solution (KPL, Catalog #50-85-06) was then added as 100 μL per well. The absorbance of each well at 450 nm was determined using a microtiter plate spectrophotometer. The response of the calibration curve on each plate was modeled using a 4-parameter logistic curve fit. The hyaluronidase activity of each unknown was calculated by interpolation from the calibration curve, corrected for sample dilution factor, and reported in U/mL.

### Example 5

### Preparation of PEGylated rHuPH20

[0549] In this example, rHuPH20 was PEGylated by reaction of the enzyme with linear N-hydroxysuccinimidyl ester of methoxy poly(ethylene glycol) butanoic acid (MBA30K).

### A. Preparation of MBA30K

[0550] In order to generate PEGPH20, rHuPH20 (which is approximately 60 KDa in size) was covalently conjugated to a linear N-hydroxysuccinimidyl ester of methoxy poly(ethylene glycol) butanoic acid (MBA30K), having an approximate molecular weight of 30 kDa. The structure of MBA30K is shown below, where n≈681:

[chemical structure]

[0551] Methods used to prepare the MBA30K that was used to PEGylate rHuPH20 are described, for example, in U.S. Pat. No. 5,672,662. Briefly, the MBA30K was made according to the following procedure:

[0552] A solution of ethyl malonate (2 equivalents) dissolved in dioxane was added dropwise to a solution of sodium hydride (2 equivalents) and toluene under a nitrogen atmosphere, followed by the addition of a solution of mPEG methane sulfonate (1 equivalent, MW 30 kDa, Shearwater) in toluene. The resulting mixture was refluxed for approximately 18 hours. The reaction mixture was then concentrated to half its original volume and extracted with a 10% aqueous NaCl solution followed by extraction with a 1% aqueous hydrochloric acid solution. The aqueous extracts were combined and extracted with dichloromethane (3×), the organic layer was dried with magnesium sulfate, then filtered and evaporated to dryness. The resulting residue was dissolved in 1N sodium hydroxide containing sodium chloride and the mixture was stirred for 1 hour. The pH of the mixture was adjusted to approximately 3 by addition of 6N hydrochloric acid.

[0553] The mixture was extracted with dichloromethane (2×), the organic layer was collected and dried over magnesium sulfate, filtered, concentrated, and poured into cold diethyl ether. The precipitate was collected by filtration and dried under vacuum. The resulting compound was dissolved in dioxane, refluxed for 8 hours, and then concentrated to dryness. The resulting residue was dissolved in water and extracted with dichloromethane (2×), dried over magnesium sulfate, concentrated by rotary evaporation, and poured into cold diethyl ether. The precipitate was collected by filtration and dried under vacuum.

[0554] The resulting compound (1 equivalent) was dissolved in dichloromethane and N-hydroxysuccinimide (2.1 equivalents) was added. The solution was cooled to 0° C. and a solution of dicyclohexylcarbodiimide (2.1 equivalents) in dichloromethane was added dropwise. The solution was stirred at room temperature for approximately 18 hours. The reaction mixture was filtered, concentrated and precipitated in diethyl ether. The precipitate was collected by filtration and dried under vacuum to afford the powder MBA30K which was then frozen at −15° C.

B. Conjugation of MBA30K to rHuPH20

[0555] To make the PEGPH20, MBA30K was coupled to the amino group(s) of rHuPH20 by covalent conjugation, providing stable amide bonds between rHuPH20 and mPEG, as shown below, where n≈681.

[chemical structure]

[0556] Prior to conjugation, the rHuPH20-purified bulk protein made in Example 3B was concentrated to 10 mg/mL using a 10 kDa polyethersulfone (PES) tangential flow filtration (TFF) cassette (Sartorius) with a 0.2 m² filtration area, and buffer exchanged against 70 mM potassium phosphate at pH 7.2. The concentrated protein was then stored at 2-8° C. until use.

[0557] To conjugate the rHuPH20, the MBA30K was thawed at room temperature in the dark for not longer than 2 hours. Depending on the batch size, a sterile 3″ stir bar was placed into a 1 or 3 L Erlenmeyer flask and buffer exchanged rHuPH20 protein was added. Five grams of dry MBA30K powder per gram of rHuPH20 (10:1 molar ratio of MBA30K: rHuPH20) was added to the flask under a vacuum hood and the mixture was mixed for 10 minutes or until the MBA30K was completely dissolved. The stir rate was set such that vortexing occurred without foaming.

[0558] The solution was then filtered under a class 100 hood by pumping the solution, via peristaltic pump, through a 0.22 μm polystyrene, cellulose acetate filter capsule (Corning 50 mL Tubetop filter) into a new 1 or 3 L Erlenmeyer flask containing a sterile 3″ stir bar. The volume of the PEGPH20 reaction mixture was determined by mass (1 g/mL density) and the 0.22 μm filter used for filtration was examined in a post-use integrity test.

[0559] The mixture was then placed on a stir plate at 2-8° C. and mixed for 20±1 hours in the dark. The stir rate was again set such that vortexing occurred without foaming. The entire Erlenmeyer was wrapped in foil to protect the solution from light. After mixing, the reaction was quenched by adding 1M glycine to a final concentration of 25 mM. Samples were removed from the container to test pH and conductivity. The pH and conductivity were then adjusted by adding to a solution of 5 mM Tris Base (5.65 L/L) and 5 mM Tris, 10 mM NaCl, pH 8.0 (13.35 L/L) to proceed with Q Sepharose purification.

[0560] A QFF Sepharose (GE Healthcare) ion exchange column (Height=21.5-24.0 cm, Diameter=20 cm) was prepared by equilibration with 5 column volumes (36 L) of 5 mM Tris, 10 mM NaCl, pH 8.0. The conjugated product was loaded onto the QFF column at a flow rate of 95 cm/hr. The column was then washed with 11 L of equilibration buffer (5 mM Tris, 10 mM NaCl, pH 8.0) at a flow rate of 95 cm/hr followed by a wash with 25 L of equilibration buffer at a flow rate of 268 cm/hr. The protein product was then eluted with 5 mM Tris, 130 mM NaCl, pH 8.0, at a flow rate of 268 cm/hr. The resulting purified PEGPH20 was concentrated to 3.5 mg/mL, using a 30 kDa polyethersulfone (PES) tangential flow filtration (TFF) cassette (Sartorius) with a 0.2 m² filtration area, and buffer exchanged against 10 mM Histidine, 130 mM NaCl at pH 6.5. The resulting material was tested for enzyme activity as described in Example 4. The PEGylated rHuPH20 material, at a concentration of 3.5 mg/mL (final enzyme activity 140,000 U/mL), was filled, in 3 mL volumes, into 5 mL glass vials with siliconized bromobutyl rubber stoppers and aluminum flip-off seals, and frozen (frozen overnight in a −80° C. freezer, then put in a −20° C. freezer for longer storage). The PEGylated rHuPH20 contained approximately 4.5 moles of PEG per mole of rHuPH20.

[0561] Following conjugation and purification, the pegylated rHuPH20 (PEGPH20) enzyme retained at least 25% of the initial specific activity (30,000 units/mg versus ˜100,000 units/mg; final PEGPH20 specific activity >38,000 units/mg).

### Example 6

### Effect of PEGPH20 on Hyaluronan (HA) Content in Skeletal Muscle of Mice

[0562] PEGPH20 was administered to mice to assess the effect of HA levels in muscle extracellular matrix (ECM). High-fat (HF) diet-induced obese (D10) mice and chow fed (control) mice were generated as described above in Example 1. After treatment of mice with PEGPH20 as indicated below, HA content was measured by immunohistochemistry as described in Example 1. Plasma hyaluronidase was measured by the method described above in Example 4.

### A. Chow Fed (Control) Mice

[0563] Sixteen week old chow fed male C57/BL6J mice received a tail vein intravenous (IV) injection of PEGPH20 (prepared according to Example 4 above) at 10 mg/kg body weight. The mice were sacrificed at either 4, 6, 12, 24, 48 or 72 hours after injection (n=3 per time point) and the HA content in muscle was measured by immunohistochemistry, as detailed above in Example 1. Plasma hyaluronidase activity also was measured in the same mice to determine the half-life of the PEGPH20.

[0564] The immunohistochemical stains showed that four hours after PEGPH20 injection, the HA in muscle decreased by 80% and that the level was maintained up to 72 hours after IV injection (data were normalized to t=0; p<0.05 vs. 0 hr). These results indicate that PEGPH20 is effective at lowering the HA content in muscle in normal mice.

[0565] The results also showed significant plasma hyaluronidase activity in mice that was measured to be approximately 5000 Units/mL at 4 hours after injection, and which steadily decreased over time. The detected activity in plasma collected 6 hours after injection was approximately 4000 U/mL, by 12 and 24 hours it was approximately 1500 U/mL, and at later time points was less than 1000 U/mL. These results showed that PEGPH20 in mouse plasma had a half-life of 5.1 hours.

### B. High Fat Diet-Induced Obese Mice

[0566] Fifteen week old DIO mice received injections of either vehicle (10 mM histidine, 130 nM NaCl, pH 6.5) or PEGPH20 at 10 mg/kg body weight intravenously once every 3 days for 24 days.

[0567] The HA content in muscle ECM was measured by immunohistochemistry, as detailed above in Example 1, and data were normalized to vehicle-treated HF fed mice. The immunohistochemical stains showed that repeated injections of PEGPH20 over a 24 day period decreased almost 90% of the HA in muscle (n=6; p<0.05 vs. vehicle HF). These results indicate that PEGPH20 is effective at lowering the HA content in muscle in diet-induced obese mice.

### Example 7

### Effect of PEGPH20 on Physical Activity and Energy Expenditure in Obese Mice

[0568] High-fat (HF) diet-induced obese (DIO) mice were generated as described above in Example 1. After one week of acclimation to the animal facility, 18 week old DIO mice (n=6 per group) received an IV tail vein injection once every 3 days for 21 days of: vehicle (10 mM histidine, 130 nM NaCl, pH 6.5); PEGPH20 at 10 mg/kg body weight; or PEGPH20 at dosages of either 0.001, 0.01, 0.1 or 1 mg/kg body weight.

[0569] Energy expenditure (EE) and physical activity of the mice were assessed by an Oxymax Deluxe System (Columbus Instruments, Columbus, Ohio). To measure energy expenditure, the rate of oxygen consumption (VO₂) and carbon dioxide production (VCO₂) were calculated and averaged over the light and dark cycles for each mouse and calculated as described by Bohlooly et al. (Diabetes 54:51-62 (2005)) using the equation: EE (Kcal/kg/hr)=(3.815+1.232×RER)×VO₂, where VO₂ is the volume of oxygen consumed per hour normalized to body weight and RER represents VCO₂/VO₂. Physical (ambulatory) activity was estimated as the number of infrared beams broken in both X and Y directions over the light and dark cycles.

[0570] Energy expenditure was measured for 2 or 3 days and 3 nights after the injection of vehicle or PEGPH20. EE was generally comparable during the light cycles for the first 2 or 3 days in vehicle-treated mice and mice treated with PEGPH20, though mice treated with higher dosages of PEGPH20 (e.g. 1 mg/kg and 10 mg/kg) exhibited slightly lower energy expenditure than mice treated with vehicle or lower levels of PEGPH20. EE measurements from the first 3 dark cycles showed that mice treated with higher levels of PEGPH20 (e.g. 1 mg/kg and 10 mg/kg) had slightly decreased EE during the first 2 dark cycles as compared to vehicle-treated mice and mice treated with lower doses of PEGPH20, but was comparable by the third dark cycle.

[0571] Energy expenditure was measured again after the 7^{th} injection of either 0.001, 0.01, 0.1 or 1 mg/kg body weight PEGPH20, with mice receiving 0.001 mg/kg PEGPH20 expending significantly more energy than the other mice on Nights 18 and 19 and Day 18. Mice treated with 0.1 mg/kg PEGPH20 exhibited an increase in energy expenditure on Day 19 as compared to the other groups of mice. By Night 20, all groups of mice (vehicle-treated and PEGPH20-treated) did not display a significant difference in energy expenditure. These results demonstrate that chronic treatment of PEGPH20 was well tolerated in mice, without overt adverse effects on energy expenditure.

[0572] During the first light and dark cycle, there was a significant decrease in physical (ambulatory) activity in mice treated with higher amounts of PEGPH20 (0.1 mg/kg, 1 mg/kg, and 10 mg/kg PEGPH20) as compared to vehicle-treated mice and mice treated with lower amounts of PEGPH20. After the second dark cycle however, only mice treated with the highest dose of PEGPH20 (10 mg/kg) exhibited decreased physical activity.

### Example 8

### Effect of PEGPH20 on Body Weight and Fat Mass in Obese Mice

[0573] High fat (HF) diet-induced obese (D10) mice were treated as described in Example 7 above with vehicle only or varying amounts of PEGPH20. In some cases, mice were treated up to 24 days or 27 days with PEGPH20. Body weight, food consumption and fat and lean mass were measured and monitored over the course of the experiment. Mice treated with the highest doses of PEGPH20 (0.1 mg/kg, 1 mg/kg and 10 mg/kg), exhibited an initial decrease in body weight that was sustained during the course of PEGPH20 treatment compared to vehicle, which was the result of an increase in lean mass, but a decrease in fat mass. For example, initially (i.e. three days after the first injection), mice treated with 10 mg/kg PEGPH20 experienced approximately a 10% decrease in body weight and fat mass, but no change in lean mass (n=10; p<0.05 vs. vehicle; p<0.05 vs. Day 0). However, this decrease in body weight and fat mass was determined to be due to decreased food consumption (˜50%) rather than from PEGPH20, Subsequent injections did not cause any further changes in body weight and the mice treated with 10 mg/kg PEGPH20 subsequently gained weight at the same rate as the vehicle-treated mice (0.12±0.03 g/day in vehicle mice vs. 0.09±0.03 g/day in 10 mg/kg PEGPH20 mice), though the fat mass remained decreased after all 8 injections. Mice treated with 0.01 mg/kg PEGPH20 also experienced a decrease in fat mass, but no significant overall decrease in whole body weight. These results demonstrate that chronic treatment of PEGPH20 was well tolerated in mice, without overt adverse effects on body weight and fat mass.

### Example 9

### Effect of Acute PEGPH20 Treatment on Insulin Resistance in High Fat Diet-Induced Obese Mice

[0574] High fat (HF) diet-induced obese (DIO) mice were treated intravenously with vehicle only or 10 mg/mL PEGPH20, Seventy-two (72) hours after administration of the intravenous bolus, hyperinsulinemic euglycemic clamp was performed on mice after acute treatment with 10 mg/kg PEGPH20 to assess insulin sensitivity. Basal fasting glucose, plasma insulin and non-esterified fatty acid concentrations were measured in 5 hour-fasted DIO mice to assess insulin sensitivity.

[0575] A hyperinsulinemic euglycemic clamp was performed using the following general procedure (Ayala et al. (2006) Diabetes 55:390-397):

[0576] Five days prior to the study, catheters were implanted in a carotid artery and a jugular vein of the mice for sampling and infusions. [3-³1-1]glucose (2.4 μCi) was primed and continuously infused for a 90 minute equilibration period (0.04 μCi/min) and a 2 hour clamp period (0.12 μCi/min). Baseline blood or plasma parameters were determined in blood samples collected at −15 and −5 minutes. At t=0, insulin infusion (4 mU/kg/min) was started and continued for 165 minutes. Blood glucose was clamped at ˜150 mg/dL using a variable glucose infusion. Mice received heparinized saline-washed erythrocytes from donors at 5 μL/min to prevent a fall in hematocrit. The hyperinsulinemic euglycemic clamp was validated by assessment of blood glucose over time. Blood glucose was monitored every 10 minutes and the GIR was adjusted as needed. Blood was taken at 80-120 minutes for the determination of [3-³H]glucose. Clamp insulin was determined at t=100 and 120 minutes. At 120 minutes, 13 μCi of 2[¹⁴C]deoxyglucose ([¹⁴C]2DG) was administered as an intravenous bolus. Blood was taken at 2-35 minutes after injection of the bolus for the determination of [¹⁴C]2DG. After the last sample, mice were anesthetized and tissues were collected.

[0577] [3-³H]glucose and [¹⁴C]2DG levels were measured in order to determine the effects of insulin, at euglycemia, on glucose metabolism in individual tissues in vivo. Plasma [3-3H]glucose and [¹⁴C]2DG radioactivity were determined by liquid scintillation counting (Packard TRI-CARB 2900TR) with Ultima Gold (Packard) as scintillant. Glucose appearance (Rₐ) and disappearance (R_{d}) rates (i.e. glucose flux) were determined using non-steady state equations (Steele et al. (1956) Am. J. Physiol. 187:15-24). Endogenous glucose production (endoRₐ) was determined by subtracting the GIR from total Rₐ. The glucose metabolic index (R_{g}) was calculated as described in Kraegen et al. (1985) Am. J. Physiol. 248:E353-E362.

[0578] Body weight, blood glucose concentration, plasma insulin concentration and plasma non-esterified fatty acid (NEFA) concentration were measured and are shown below in Table 5.

TABLE 5
Basal and clamp characteristics of DIO mice after acute vehicle or
PEGPH20 treatment

| | Vehicle | PEGPH20 |
|---|---|---|
| n | 4 | 5 |
| Weight (g) | 35 ± 1.5 | 34 ± 1.9 |
| Blood glucose (mg/dL) | | |
| Basal | 125 ± 9 | 119 ± 8 |
| Clamp^{§} | 154 ± 3 | 151 ± 2 |
| Plasma insulin (ng/mL) | | |
| Basal | 3.1 ± 1.0 | 3.6 ± 0.9 |
| Clamp^{§} | 7.5 ± 0.4 | 7.6 ± 0.7 |
| Plasma NEFA (mM) | | |
| Basal | 0.90 ± 0.13 | 0.62 ± 0.04 |
| Clamp^{§} | 0.14 ± 0.01 | 0.14 ± 0.04 |

^{§}Data are presented as the average of values obtained from 80-120 minutes of the hyperinsulinemic euglycemic clamp
All data are expressed as mean ± SEM

[0579] The results showed that one injection of PEGPH20 did not affect basal concentrations of fasting glucose, plasma insulin, or NEFA concentration. Glucose concentration was clamped at 150 mg/dL in both groups of mice during the hyperinsulinemic euglycemic clamp. Plasma insulin was equivalently elevated and NEFA levels were decreased to a similar extent in both groups of mice during the hyperinsulinemic euglycemic clamp.

[0580] Glucose infusion rate (GIR), endogenous glucose production (endoRₐ) and disappearance rate (R_{d}), and muscle glucose uptake index (R_{g}) in the gastrocnemius and superficial vastus lateralus (SVL) were determined as described above (n=4-5). The GIR required to maintain euglycemia during the hyperinsulinemic euglycemic clamp was comparable between the two groups of mice, with an initial GIR of ˜25 mg/kg/min and rising to ˜42 mg/kg/min by the end of the hyperinsulinemic euglycemic clamp (t=120 min). This indicates that insulin sensitivity was unaffected by acute PEGPH20 treatment. Likewise, R_{g} in the gastrocnemius and SVL were not statistically different between the two groups. EndoRₐ and R_{d} were similar between the two groups of mice at basal state and during the hyperinsulinemic euglycemic clamp. These data indicate that one injection of 10 mg/kg PEGPH20 did not affect insulin action in DIO mice.

### Example 10

### Effect of Chronic PEGPH20 Treatment on Insulin Resistance in High Fat Diet-Induced Obese Mice

[0581] High fat (HF) diet-induced obese (DIO) mice generated as described in Example 1 were treated intravenously with vehicle only, 10 mg/kg PEGPH20 or varying amounts of PEGPH20 (0.001, 0.01, 0.1 or 1 mg/kg) every 3 days for 24 days. Three days after the last treatment, a hyperinsulinemic euglycemic clamp was performed on mice after chronic treatment with PEGPH20 to assess insulin sensitivity, following the technique described in Example 9. Basal fasting glucose, plasma insulin and non-esterified fatty acid concentrations were measured. Glucose infusion rate (GIR), endogenous glucose production (endoRₐ) and disappearance rate (R_{d}), and muscle glucose uptake index (R_{g}) in the gastrocnemius and superficial vastus lateralus (SVL) were determined as described above in Example 9.

[0582] Glucose concentration was clamped at 150 mg/dL in all groups of mice during the hyperinsulinemic euglycemic clamp. Consistent with lower basal plasma insulin, clamp insulin concentration in the chronic 10 mg/kg PEGPH20-treated mice was 50% lower than what was seen in chronic vehicle-treated mice during the hyperinsulinemic euglycemic clamp. Plasma NEFA was also lower during the hyperinsulinemic euglycemic clamp in the 10 mg/kg PEGPH20-treated mice relative to vehicle-treated mice. The decreased plasma NEFA concentration during the hyperinsulinemic euglycemic clamp indicates increased insulin-induced suppression of lipolysis, consistent with the broad interstitial presence of HA. Chronic treatment with 10 mg/kg PEGPH20 also did not affect the basal concentrations of arterial glucose or NEFA in the mice. In contrast, basal arterial insulin was decreased by 50% in the 10 mg/kg PEGPH20 mice as compared to the vehicle mice.

[0583] Despite the lowered insulin concentration during the hyperinsulinemic euglycemic clamp, all PEGPH20-treated mice, with the exception of mice treated with the lowest dosage of PEGPH20 (0.001 mg/kg), required higher GIR to maintain euglycemia as compared to mice treated with vehicle. This shows that PEGPH20 improves insulin action in a dose-dependent manner, with less effects observed at the lowest concentration tested.

[0584] Basal endoRₐ and R_{d} were similar in all groups of mice, except for mice treated with 1 mg/kg PEGPH20, which exhibited a slightly higher basal endoRₐ and R_{d}. During the hyperinsulinemic euglycemic clamp, however, endoRₐ was lower in the mice treated with the highest dosages of PEGPH20 (1 mg/kg and 10 mg/kg) as compared to the other mice. R_{d} during the hyperinsulinemic euglycemic clamp was equivalently increased in all groups of mice relative to baseline. R_{g} in the gastrocnemius and SVL was also increased in the 10 mg/kg PEGPH20-treated mice when compared to chronic vehicle-treated mice. The increased glucose metabolic index (R_{g}) and glucose fluxes indicate that chronic treatment with PEGPH20 is dose-dependent whereby higher amounts of PEGPH20 improve insulin sensitivity in DIO mice while lower dose PEGPH20 treatment have a lesser effect or no effect on insulin action in DIO mice.

[0585] Insulin-induced suppression of liver glucose production, as calculated by: (Basal endoRₐ-Clamp endoRₐ)/Basal endoRₐ×100%, was also increased.

### Example 11

### Effect of Chronic PEGPH20 Treatment on Muscle Insulin-Mediated Signaling

[0586] In animals treated as described in Example 10, the effect of PEGPH20 on Akt signaling was assessed to determine if the improved insulin action in mice treated with 10 mg/kg PEGPH20 was a consequence of increased expression of Akt rather than improved activation of the existing signaling components. Protein expression of Akt and phosphorylated Akt was assessed. At the conclusion of the hyperinsulinemic euglycemic clamp, gastrocnemius muscle was collected and Western Blotting was performed as follows:

[0587] Gastrocnemius was homogenized in buffer containing 50 mM Tris-HCl (pH7.5), 1 mM EDTA, 1 mM EGTA, 10% glycerol, 1% Triton X-100, 1 mM DTT, 1 mM PMSF, 5 μg/mL protease inhibitor, 50 mM NaF, and 5 mM sodium pyrophosphate, and centrifuged at 13,000 rpm for 20 minutes at 4° C. 40 μg of the supernatant was applied to 4-12% SDS-PAGE gel. Phosphorylated and total Akt/PKB were probed using phospho-Akt(Ser473) and Akt antibodies (Cell Signaling, Danvers, Mass.).

[0588] The increased glucose flux and muscle R_{g} during the hyperinsulinemic euglycemic clamp was consistent with increased muscle insulin signaling after the clamp. Phosphorylation of Akt as well as total Akt were increased in gastrocnemius of chronic PEGPH20-treated DIO mice, indicative of improved insulin signaling, while the ratio of the two was not increased (n=3-4; p<0.05 vs. vehicle; data were normalized to vehicle). The fact that both phosphorylated and total Akt were increased, but the ratio of the two was not, shows that improved insulin action was a consequence of increased expression of Akt and not improved activation of the existing signaling components.

### Example 12

### Effect of Chronic PEGPH20 Treatment on Collagen Expression in Muscle and Muscle Vascularization

[0589] Increased skeletal muscle collagen levels are observed in diet-induced insulin resistant mice, with an increase in vascularization occurring following reversal of muscle insulin resistance (Kang et al. (2011) Diabetes 60:416-426). In animals treated as described in Example 10, the effect of chronic PEGPH20 treatment on collagen IV (ColIV) levels and vascularization in skeletal muscle was assessed by immunohistochemistry. Immunohistochemistry was performed as described above in Example 1 on the gastrocnemius muscles collected at the end of the hyperinsulinemic euglycemic clamp, using anti-ColIV (Abcam, Cambridge, Mass.) as the primary antibody. Immunostaining of CD31 was carried out using anti-CD31 (BD Biosciences). ColIV expression was measured by the integrated intensity of staining and muscle vascularity was determined by counting CD31-positive structures.

[0590] Percent cardiac output to muscle (i.e. skeletal muscle blood flow) was also assessed, using the procedure in Lee-Young et al. (2009) J. Biol. Chem. 284:23925-23934. Briefly, following the final arterial blood sample of the hyperinsulinemic euglycemic clamp, 50 μL of yellow DYE-TRAK® microspheres (15 μm; Triton Technology, Inc., San Diego, Calif.) were injected into the carotid artery, followed by a small volume of saline. Gastrocnemius was then immediately collected. Microspheres in the tissues were isolated and N,N-dimethylformamide was used to elute the fluorescent dye from the microspheres. The optical density of the N,N-dimethylformamide solution was determined at a wave length of 450 nm. Adequacy of microsphere mixing was assumed if the concentrations of microspheres in the right and left kidney were within 10%.

[0591] Immunohistochemistry showed that chronic PEGPH20 treatment in DIO mice did not affect the expression of ColIV in muscle as compared to vehicle-treated mice (n=6-8; vehicle=1.00±0.31; chronic PEGPH20=1.11±0.15; data normalized to vehicle). Consistent with the observation that reversal of muscle insulin resistance during a HF diet feeding is associated with increased muscle vascularization, the results showed that increased muscle insulin action in the PEGPH20-treated DIO mice was associated with an increase in the expression of the vascular marker, CD31 (n=6-8; vehicle=1.00±0.08; chronic PEGPH20=1.31±0.07; p<0.05 vs. vehicle; data normalized to vehicle). Increased muscle vascularization in the PEGPH20-treated mice was also consistent with a 1.5 fold increase in the fraction of cardiac output going to skeletal muscle in the PEGPH20-treated DIO mice (n=4-8; p<0.05 vs. vehicle; data normalized to vehicle).

### Example 13

### Effect of Chronic PEGPH20 Treatment on Glucose Uptake in Isolated Muscle

[0592] In animals treated as described in Example 10, the effect of PEGPH20 glucose uptake was assessed in isolated muscles to further define whether the effects of chronic PEGPH20 treatment were due to sensitization of muscle to the direct actions of insulin. On day 27 (3 days after the final injection), mice chronically treated with vehicle or 10 mg/kg PEGPH20 for 24 days were anesthetized and soleus and extensor digitorum longus (EDL) muscles were excised. Glucose uptake in isolated muscles was measured as follows (Jorgensen et al. (2004) J. Biol. Chem. 279:1070-1079): Soleus and EDL muscles were incubated in Krebs Henseleit bicarbonate buffer containing 1.2 mM KH₂PO₄, 25 mM NaHCO₃, 118.5 mM NaCl, 4.7 mM KCl, 2.5 mM CaCl₂, 1.2 mM MgSO₄, pH 7.4 supplemented with 8 mM mannitol, 2 mM pyruvate and 0.01% bovine serum albumin at 30° C. under continuous gassing with 95% O₂ and 5% CO₂. After 10 minutes of basal incubation, muscles were stimulated with or without insulin at 10 mU/mL for 30 minutes. [³H]2DG uptake was measured by adding cold 2DG (1 mM), [³H]2DG (0.25 μCi/mL) and D-[¹⁴C]mannitol (0.16 Ci/mL). After 10 minutes of incubation, muscles were washed and homogenized. Radioactivity in the supernatant was determined by liquid scintillation counting.

[0593] In vitro [³H]2DG uptake in isolated soleus was higher at basal state in the PEGPH20-treated mice vs. vehicle-treated mice (n=7-9; p<0.05 vs. vehicle). Ten minutes of insulin stimulation at 10 mU/mL increased [³]2DG uptake in both groups (PEGPH20 and vehicle) by similar increments/fold changes (n=7-9; p<0.05 vs. vehicle and p<0.05 vs. basal). [³H]2DG uptake was the same in the EDL in both basal and insulin-stimulated states in the PEGPH20-treated mice and vehicle-treated mice (n=7-9; p<0.05 vs. vehicle and p<0.05 vs. basal).

[0594] Insulin-stimulated muscle glucose uptake in isolated muscles in vitro was not affected by chronic PEGPH20 treatment, though increased muscle insulin action with PEGPH20 treatment was observed in vivo. Increased muscle insulin action in vivo was associated with increased muscle vascularization and a greater percent cardiac output going to muscle. Isolated muscle in vitro lacks the intact physiological interactions between muscle fibers and surrounding matrix and capillaries. The improved vascular access of hormones and glucose in vivo is likely responsible for the increased insulin action. When the interaction between muscle and surrounding matrix and capillaries is disassociated, muscle insulin action is no longer increased by chronic PEGPH20. An increase in basal muscle glucose uptake was observed in isolated soleus, demonstrating that chronic PEGPH20 treatment has an impact on muscle cells, especially the slow-twitch fibers, as EDL muscle, which is primarily composed of fast-twitch fibers, was not affected.

### Example 14

### Effect of Chronic PEGPH20 Treatment on Adipocyte Cell Size and Gene Expression of Macrophage Markers in Adipose Tissue

[0595] Insulin responsiveness of adipose tissue is dependent upon adipose cell size, with larger adipose cells observed in obese subjects, thus resulting in lower insulin sensitivity in the tissue (Salmis et al. (1968) J. Clin. Invest. 47:153-165). In animals treated as described in Example 10, the adipose tissue of the DIO mice treated with 10 mg/kg PEGPH20 or vehicle-treatment were stained with Toluidine Blue 0 according to manufacturer's instruction (Newcomer Supply, Middleton, Wis.). Adipocyte diameter and distribution range was determined by manual measurements of the diameters of at least 100 adipocytes from each mouse (n=5 mice per group). The results indicated that adipocyte cell size was significantly reduced in the adipose tissue of mice treated with PEGPH20 as compared to mice treated with vehicle.

[0596] Many inflammation- and macrophage-specific genes are highly upregulated in white adipose tissue in high-fat diet-induced obese mice (Xu et al. (2003) J. Clin. Invest. 112:1821-1830). To determine the effect of chronic treatment of PEGPH20 on the expression of inflammation and macrophage-specific genes in HF DIO mice, RNA was isolated from 100 mg of perigonadal adipose tissue using the RNeasy minikit from Qiagen (Valencia, Calif.). cDNA was synthesized using the iScript cDNA synthesis kit from BioRad (Hercules, Calif.). cDNA was diluted 1:2 or 1:10 and then used for real-time PCR analysis on a BioRad iQ5 machine. Tagman gene expression assays were purchased from Applied Biosystems (Foster City, Calif.) for the following genes: F4/80 (Mm00802529_m1), CD11c (Mm00498698_m1), TNFa (Mm00443258_m1), IL-12 (Mm00434165_m1), IL-1b (Mm01336189_m1), CCL2 (Mm00441242_m1), Mel1 (Mm00546124_m1), IL-10 (Mm99999062_m1), CD 163 (Mm00474091_m1). Quantification of 18S (4352930E) was performed for each sample, and final relative concentration was determined by comparing each gene of interest to 18S using the delta delta CT method (Livak et al. (2001) Methods. 25: 402-408).

[0597] The results showed that while there was no significant difference in total gene expression of macrophage (Mθ) markers F4/80 and CD11c, there was a statistical difference in several M1 (classically activated macrophages) and M2 (alternatively activated macrophages) markers. Expression of M1 markers IL-12, IL-1b and CCL2, and M2 markers IL-10, CD163 and Mgl1 was reduced in PEGPH20-treated mice as compared to vehicle-treated mice. Expression of M1 marker TNF was not significantly reduced in PEGPH20-treated mice.

[0598] Since modifications will be apparent to those of skill in this art, it is intended that this invention be limited only by the scope of the appended claims.

The application's sequence listing, which the Patent Office published only in electronic form, follows.

SEQUENCE LISTING (211 sequences)

SEQ ID NO: 1 - protein, 509 aa, Homo sapiens
  precursor human PH20
MGVLKFKHIFFRSFVKSSGVSQIVFTFLLIPCCLTLNFRAPPVIPNVPFLWAWNAPSEFCLGKFDEPLDMSLFSFIGSPRINATGQGVTIFYVDRLGYYPYIDSITGVTVNGGIPQKISLQDHLDKAKKDITFYMPVDNLGMAVIDWEEWRPTWARNWKPKDVYKNRSIELVQQQNVQLSLTEATEKAKQEFEKAGKDFLVETIKLGKLLRPNHLWGYYLFPDCYNHHYKKPGYNGSCFNVEIKRNDDLSWLWNESTALYPSIYLNTQQSPVAATLYVRNRVREAIRVSKIPDAKSPLPVFAYTRIVFTDQVLKFLSQDELVYTFGETVALGASGIVIWGTLSIMRSMKSCLLLDNYMETILNPYIINVTLAAKMCSQVLCQEQGVCIRKNWNSSDYLHLNPDNFAIQLEKGGKFTVRGKPTLEDLEQFSEKFYCSCYSTLSCKEKADVKDTDAVDVCIADGVCIDAFLKPPMETEEPQIFYNASPSTLSATMFIVSILFLIISSVASL

SEQ ID NO: 2 - protein, 474 aa, Homo sapiens
  Mature PH20
LNFRAPPVIPNVPFLWAWNAPSEFCLGKFDEPLDMSLFSFIGSPRINATGQGVTIFYVDRLGYYPYIDSITGVTVNGGIPQKISLQDHLDKAKKDITFYMPVDNLGMAVIDWEEWRPTWARNWKPKDVYKNRSIELVQQQNVQLSLTEATEKAKQEFEKAGKDFLVETIKLGKLLRPNHLWGYYLFPDCYNHHYKKPGYNGSCFNVEIKRNDDLSWLWNESTALYPSIYLNTQQSPVAATLYVRNRVREAIRVSKIPDAKSPLPVFAYTRIVFTDQVLKFLSQDELVYTFGETVALGASGIVIWGTLSIMRSMKSCLLLDNYMETILNPYIINVTLAAKMCSQVLCQEQGVCIRKNWNSSDYLHLNPDNFAIQLEKGGKFTVRGKPTLEDLEQFSEKFYCSCYSTLSCKEKADVKDTDAVDVCIADGVCIDAFLKPPMETEEPQIFYNASPSTLSATMFIVSILFLIISSVASL

SEQ ID NO: 3 - protein, 482 aa, Homo sapiens
  precursor PH20 1-482
MGVLKFKHIFFRSFVKSSGVSQIVFTFLLIPCCLTLNFRAPPVIPNVPFLWAWNAPSEFCLGKFDEPLDMSLFSFIGSPRINATGQGVTIFYVDRLGYYPYIDSITGVTVNGGIPQKISLQDHLDKAKKDITFYMPVDNLGMAVIDWEEWRPTWARNWKPKDVYKNRSIELVQQQNVQLSLTEATEKAKQEFEKAGKDFLVETIKLGKLLRPNHLWGYYLFPDCYNHHYKKPGYNGSCFNVEIKRNDDLSWLWNESTALYPSIYLNTQQSPVAATLYVRNRVREAIRVSKIPDAKSPLPVFAYTRIVFTDQVLKFLSQDELVYTFGETVALGASGIVIWGTLSIMRSMKSCLLLDNYMETILNPYIINVTLAAKMCSQVLCQEQGVCIRKNWNSSDYLHLNPDNFAIQLEKGGKFTVRGKPTLEDLEQFSEKFYCSCYSTLSCKEKADVKDTDAVDVCIADGVCIDAFLKPPMETEEPQIFY

SEQ ID NO: 4 - protein, 447 aa, Homo sapiens [sequence omitted]

SEQ ID NO: 5 - protein, 446 aa, Homo sapiens
  PH20 36-481
LNFRAPPVIPNVPFLWAWNAPSEFCLGKFDEPLDMSLFSFIGSPRINATGQGVTIFYVDRLGYYPYIDSITGVTVNGGIPQKISLQDHLDKAKKDITFYMPVDNLGMAVIDWEEWRPTWARNWKPKDVYKNRSIELVQQQNVQLSLTEATEKAKQEFEKAGKDFLVETIKLGKLLRPNHLWGYYLFPDCYNHHYKKPGYNGSCFNVEIKRNDDLSWLWNESTALYPSIYLNTQQSPVAATLYVRNRVREAIRVSKIPDAKSPLPVFAYTRIVFTDQVLKFLSQDELVYTFGETVALGASGIVIWGTLSIMRSMKSCLLLDNYMETILNPYIINVTLAAKMCSQVLCQEQGVCIRKNWNSSDYLHLNPDNFAIQLEKGGKFTVRGKPTLEDLEQFSEKFYCSCYSTLSCKEKADVKDTDAVDVCIADGVCIDAFLKPPMETEEPQIF

SEQ ID NO: 6 - protein, 445 aa, Homo sapiens
  PH20 36-480
LNFRAPPVIPNVPFLWAWNAPSEFCLGKFDEPLDMSLFSFIGSPRINATGQGVTIFYVDRLGYYPYIDSITGVTVNGGIPQKISLQDHLDKAKKDITFYMPVDNLGMAVIDWEEWRPTWARNWKPKDVYKNRSIELVQQQNVQLSLTEATEKAKQEFEKAGKDFLVETIKLGKLLRPNHLWGYYLFPDCYNHHYKKPGYNGSCFNVEIKRNDDLSWLWNESTALYPSIYLNTQQSPVAATLYVRNRVREAIRVSKIPDAKSPLPVFAYTRIVFTDQVLKFLSQDELVYTFGETVALGASGIVIWGTLSIMRSMKSCLLLDNYMETILNPYIINVTLAAKMCSQVLCQEQGVCIRKNWNSSDYLHLNPDNFAIQLEKGGKFTVRGKPTLEDLEQFSEKFYCSCYSTLSCKEKADVKDTDAVDVCIADGVCIDAFLKPPMETEEPQI

SEQ ID NO: 7 - protein, 444 aa, Homo sapiens
  PH20 36-479
LNFRAPPVIPNVPFLWAWNAPSEFCLGKFDEPLDMSLFSFIGSPRINATGQGVTIFYVDRLGYYPYIDSITGVTVNGGIPQKISLQDHLDKAKKDITFYMPVDNLGMAVIDWEEWRPTWARNWKPKDVYKNRSIELVQQQNVQLSLTEATEKAKQEFEKAGKDFLVETIKLGKLLRPNHLWGYYLFPDCYNHHYKKPGYNGSCFNVEIKRNDDLSWLWNESTALYPSIYLNTQQSPVAATLYVRNRVREAIRVSKIPDAKSPLPVFAYTRIVFTDQVLKFLSQDELVYTFGETVALGASGIVIWGTLSIMRSMKSCLLLDNYMETILNPYIINVTLAAKMCSQVLCQEQGVCIRKNWNSSDYLHLNPDNFAIQLEKGGKFTVRGKPTLEDLEQFSEKFYCSCYSTLSCKEKADVKDTDAVDVCIADGVCIDAFLKPPMETEEPQ

SEQ ID NO: 8 - protein, 443 aa, Homo sapiens
  PH20 36-478
LNFRAPPVIPNVPFLWAWNAPSEFCLGKFDEPLDMSLFSFIGSPRINATGQGVTIFYVDRLGYYPYIDSITGVTVNGGIPQKISLQDHLDKAKKDITFYMPVDNLGMAVIDWEEWRPTWARNWKPKDVYKNRSIELVQQQNVQLSLTEATEKAKQEFEKAGKDFLVETIKLGKLLRPNHLWGYYLFPDCYNHHYKKPGYNGSCFNVEIKRNDDLSWLWNESTALYPSIYLNTQQSPVAATLYVRNRVREAIRVSKIPDAKSPLPVFAYTRIVFTDQVLKFLSQDELVYTFGETVALGASGIVIWGTLSIMRSMKSCLLLDNYMETILNPYIINVTLAAKMCSQVLCQEQGVCIRKNWNSSDYLHLNPDNFAIQLEKGGKFTVRGKPTLEDLEQFSEKFYCSCYSTLSCKEKADVKDTDAVDVCIADGVCIDAFLKPPMETEEP

SEQ ID NO: 9 - protein, 442 aa, Homo sapiens
  PH20 36-477
LNFRAPPVIPNVPFLWAWNAPSEFCLGKFDEPLDMSLFSFIGSPRINATGQGVTIFYVDRLGYYPYIDSITGVTVNGGIPQKISLQDHLDKAKKDITFYMPVDNLGMAVIDWEEWRPTWARNWKPKDVYKNRSIELVQQQNVQLSLTEATEKAKQEFEKAGKDFLVETIKLGKLLRPNHLWGYYLFPDCYNHHYKKPGYNGSCFNVEIKRNDDLSWLWNESTALYPSIYLNTQQSPVAATLYVRNRVREAIRVSKIPDAKSPLPVFAYTRIVFTDQVLKFLSQDELVYTFGETVALGASGIVIWGTLSIMRSMKSCLLLDNYMETILNPYIINVTLAAKMCSQVLCQEQGVCIRKNWNSSDYLHLNPDNFAIQLEKGGKFTVRGKPTLEDLEQFSEKFYCSCYSTLSCKEKADVKDTDAVDVCIADGVCIDAFLKPPMETEE

SEQ ID NO: 10 - protein, 450 aa, Bos taurus
  hyaluronidase
MRPFSLEVSLHLPWAMAAHLLPVCTLFLNLLSMTQGSRDPVVPNQPFTTIWNANTEWCMKKHGVDVDISIFDVVTNPGQTFRGPNMTIFYSSQLGTYPYYTSAGEPVFGGLPQNASLNAHLARTFQDILAAMPEPRFSGLAVIDWEAWRPRWAFNWDTKDIYRQRSRALVQKQHPDWLAPRVEAAAQDQFEGAAEEWMAGTLKLGQALRPQGLWGFYNFPECYNYDFKSPNYTGRCPLNICAQNDQLGWLWGQSRALYPSIYLPAALEGTKKTQMFVQHRVAEAFRVAAGAGDPKLPVLPYMQLFYDMTNHFLPAEELEHSLGESAAQGAAGVVLWVSWLSTSTKESCQAIKEYVDTTLGPSILNVTSGARLCSQVLCSGHGRCARRPSYPKARLILNSTSFSIKPTPGGGPLTLQGALSLEDRLRMAVEFECRCYRGWRGTRCEQWGMW

SEQ ID NO: 11 - protein, 553 aa, Bos taurus
  Precursor cow PH20
MRMLRRHHISFRSFAGSSGTPQAVFTFLLLPCCLALDFRAPPLISNTSFLWAWNAPVERCVNRRFQLPPDLRLFSVKGSPQKSATGQFITLFYADRLGYYPHIDEKTGKTVFGGIPQLGNLKSHMEKAKNDIAYYIPNDSVGLAVIDWENWRPTWARNWKPKDVYRDESVELVLQKNPQLSFPEASKIAKVDFETAGKSFMQETLKLGKLLRPNHLWGYYLFPDCYNHNHNQPTYNGNCPDVEKRRNDDLEWLWKESTALFPSVYLNIRLKSTQNAALYVRNRVQEAIRLSKIASVESPLPVFVYARPVFTDGSSTYLSQGDLVNSVGEIVSLGASGIIMWGSLNLSLSMQSCMNLGTYLNTTLNPYIINVTLAAKMCSQVLCHNEGVCTRKHWNSSDYLHLNPMNFAIQTGEGGKYTVPGTVTLEDLQKFSDTFYCSCYANIHCKKRVDIKNVHSVNVCMAEDICIDSPVKLQPSDHSSSQEASTTTFSSISPSTTTATVSPCTPEKHSPECLKVRCSEVIPNVTQKACQSVKLKNISYQSPIQNIKNQTTY

SEQ ID NO: 12 - protein, 331 aa, Vespula vulgaris
  hyaluronidase A
SERPKRVFNIYWNVPTFMCHQYDLYFDEVTNFNIKRNSKDDFQGDKIAIFYDPGEFPALLSLKDGKYKKRNGGVPQEGNITIHLQKFIENLDKIYPNRNFSGIGVIDFERWRPIFRQNWGNMKIHKNFSIDLVRNEHPTWNKKMIELEASKRFEKYARFFMEETLKLAKKTRKQADWGYYGYPYCFNMSPNNLVPECDVTAMHENDKMSWLFNNQNVLLPSVYVRQELTPDQRIGLVQGRVKEAVRISNNLKHSPKVLSYWWYVYQDETNTFLTETDVKKTFQEIVINGGDGIIIWGSSSDVNSLSKCKRLQDYLLTVLGPIAINVTEAVN

SEQ ID NO: 13 - protein, 340 aa, Vespula vulgaris
  hyaluronidase B
DRTIWPKKGFSIYWNIPTHFCHNFGVYFKELKQFNIKYNSMNNFRGETISLFYDPGNFPSMVLLKNGTYEIRNEGVPQKGNLTIHLEQFTKELDEIYPKKIAGGIGVIHFHNWRPIFRRNVDNLKINKDISIDLVRKEHPKWDKSMIEKEASNRFETSAKIFMEKTLKLAKEIRKKTEWGYHGYPHCLSGSTDKPSFDCDALSMSENDKMSWLFNNQNVLLPSIYLKNVLKPDEKIHLVQERLKEAIRISKNFKHLPKVLPYWWYTYQDKESIFLTEADVKNTFKEILTNGADGIIIWGVSYELTDRKRCEKLKEYLMKILGPIAFKVTKAVKENTPLNF

SEQ ID NO: 14 - protein, 382 aa, Apis mellifera
  hyaluronidase
MSRPLVITEGMMIGVLLMLAPINALLLGFVQSTPDNNKTVREFNVYWNVPTFMCHKYGLRFEEVSEKYGILQNWMDKFRGEEIAILYDPGMFPALLKDPNGNVVARNGGVPQLGNLTKHLQVFRDHLINQIPDKSFPGVGVIDFESWRPIFRQNWASLQPYKKLSVEVVRREHPFWDDQRVEQEAKRRFEKYGQLFMEETLKAAKRMRPAANWGYYAYPYCYNLTPNQPSAQCEATTMQENDKMSWLFESEDVLLPSVYLRWNLTSGERVGLVGGRVKEALRIARQMTTSRKKVLPYYWYKYQDRRDTDLSRADLEATLRKITDLGADGFIIWGSSDDINTKAKCLQFREYLNNELGPAVKRIALNNNANDRLTVDVSVDQV

SEQ ID NO: 15 - protein, 331 aa, Dolichovespula maculata
  hyaluronidase
SERPKRVFNIYWNVPTFMCHQYGLYFDEVTNFNIKHNSKDDFQGDKISIFYDPGEFPALLPLKEGNYKIRNGGVPQEGNITIHLQRFIENLDKTYPNRNFNGIGVIDFERWRPIFRQNWGNMMIHKKFSIDLVRNEHPFWDKKMIELEASKRFEKYARLFMEETLKLAKKTRKQADWGYYGYPYCFNMSPNNLVPDCDATAMLENDKMSWLFNNQNVLLPSVYIRHELTPDQRVGLVQGRVKEAVRISNNLKHSPKVLSYWWYVYQDDTNTFLTETDVKKTFQEIAINGGDGIIIWGSSSDVNSLSKCKRLREYLLTVLGPITVNVTETVN

SEQ ID NO: 16 - protein, 367 aa, Polistes annularis
  hyaluronidase
YVSLSPDSVFNIITDDISHQILSRSNCERSKRPKRVFSIYWNVPTFMCHQYGMNFDEVTDFNIKHNSKDNFRGETISIYYDPGKFPALMPLKNGNYEERNGGVPQRGNITIHLQQFNEDLDKMTPDKNFGGIGVIDFERWKPIFRQNWGNTEIHKKYSIELVRKEHPKWSESMIEAEATKKFEKYARYFMEETLKLAKKTRKRAKWGYYGFPYCYNVTPNNPGPDCDAKATIENDRLSWMYNNQEILFPSVYVRHEQKPEERVYLVQGRIKEAVRISNNLEHSPSVLAYWWYVYQDKMDIYLSETDVEKTFQEIVTNGGDGIIIWGSSSDVNSLSKCKRLREYLLNTLGPFAVNVTETVNGRSSLNF

SEQ ID NO: 17 - protein, 462 aa, Mus musculus
  hyaluronidase
MLGLTQHAQKVWRMKPFSPEVSPGSSPATAGHLLRISTLFLTLLELAQVCRGSVVSNRPFITVWNGDTHWCLTEYGVDVDVSVFDVVANKEQSFQGSNMTIFYREELGTYPYYTPTGEPVFGGLPQNASLVTHLAHTFQDIKAAMPEPDFSGLAVIDWEAWRPRWAFNWDSKDIYRQRSMELVQAEHPDWPETLVEAAAKNQFQEAAEAWMAGTLQLGQVLRPRGLWGYYGFPDCYNNDFLSLNYTGQCPVFVRDQNDQLGWLWNQSYALYPSIYLPAALMGTGKSQMYVRHRVQEALRVAIVSRDPHVPVMPYVQIFYEMTDYLLPLEELEHSLGESAAQGVAGAVLWLSSDKTSTKESCQAIKAYMDSTLGPFIVNVTSAALLCSEALCSGHGRCVRHPSYPEALLTLNPASFSIELTHDGRPPSLKGTLSLKDRAQMAMKFRCRCYRGWRGKWCDKRGM

SEQ ID NO: 18 - protein, 473 aa, Mus musculus
  Hyaluronidase 2
MRAGLGPIITLALVLEVAWAGELKPTAPPIFTGRPFVVAWNVPTQECAPRHKVPLDLRAFDVKATPNEGFFNQNITTFYYDRLGLYPRFDAAGTSVHGGVPQNGSLCAHLPMLKESVERYIQTQEPGGLAVIDWEEWRPVWVRNWQEKDVYRQSSRQLVASRHPDWPSDRVMKQAQYEFEFAARQFMLNTLRYVKAVRPQHLWGFYLFPDCYNHDYVQNWESYTGRCPDVEVARNDQLAWLWAESTALFPSVYLDETLASSVHSRNFVSFRVREALRVAHTHHANHALPVYVFTRPTYTRGLTGLSQVDLISTIGESAALGSAGVIFWGDSEDASSMETCQYLKNYLTQLLVPYIVNVSWATQYCSWTQCHGHGRCVRRNPSANTFLHLNASSFRLVPGHTPSEPQLRPEGQLSEADLNYLQKHFRCQCYLGWGGEQCQRNYKGAAGNASRAWAGSHLTSLLGLVAVALTWTL

SEQ ID NO: 19 - protein, 412 aa, Mus musculus
  hyalurinidase 3
MIMHLGLMMVVGLTLCLMHGQALLQVPEHPFSVVWNVPSARCKAHFGVHLPLDALGIVANHGQHFHGQNISIFYKNQFGLYPYFGPRGTAHNGGIPQAVSLDHHLARAAHQILHSLGSSFAGLAVLDWEEWYPLWAGNWGPHRQVYLAASWVWTQQMFPGLDPQEQLHKAHTSFEQAARALMEYTLQLGRTLRPSGLWGFYRYPACGNGWHKMASNYTGHCHAAITTQNTQLRWLWAASSALFPSIYLPPRLPLAYRQAFVRHRLEEAFRVALLEHSHPLPVLAYSRLTHRSSGRFLSLDDLMQTIGVSAALGTAGVVLWGDLSFSSSEEKCWRLHDYLVGTLGPYVINVTKADMACSHQRCHGHGRCARKDPGQMEAFLHLQPDDSLGAWNSFRCHCYSGWAGPTCLEPKP

SEQ ID NO: 20 - protein, 435 aa, Sus scrofa
  hyalauronidase
MAAHLLPICTLFLNLLSVAQGSRDPVVLNRPFTTIWNANTQWCLKRHGVDVDVSVFEVVVNPGQTFRGPNMTIFYSSQLGTYPYYTSAGEPVFGGLPQNASLDVHLNRTFKDILAAMPESNFSGLAVIDWEAWRPRWAFNWDAKDIYRQRSRALVQKQHPDWPAPWVEAAAQDQFQEAAQTWMAGTLKLGQTLRPHGLWGFYGFPDCYNYDFQSSNYTGQCPPGVSAQNDQLGWLWGQSRALYPSIYLPSALEGTNKTQLYVQHRVNEAFRVAAAAGDPNLPVLPYAQIFHDMTNRLLSREELEHSLGESAAQGAAGVVLWVSWENTRTKESCQSIKEYVDTTLGPFILNVTSGALLCSQAVCSGHGRCVRRPSHTEALPILNPSSFSIKPTPGGGPLTLQGALSLKDRVQMAEEFQCRCYPGWRGTWCEQQGTR

SEQ ID NO: 21 - protein, 419 aa, Sus scrofa
  hyaluronidase 3
MTMQLGLALVLGVAMCLGCGQPLLRAPERPFCVLWNVPSARCKARFGVHLPLEALGITANHGQRFHGQNITIFYKSQLGLYPYFGPRGTAHNGGIPQAVSLDHHLARAAYQIHRSLRPGFTGLAVLDWEEWCPLWAGNWGRRQAYQAASCAWAQRVYPNLDPQEQLCKARAGFEEAARALMEDTLRLGRMLRPHGLWGFYHYPACGNGWHGTASNYTGHCHAAALARNTQLYWLWAASSALFPSIYLPPGLPPAYHQAFVRYRLEEAFRVALVGHPHPLPVLAYARLTHRNSGRFLSQDELVQTIGVSAALGASGVVLWGDLSFSSSEEECWHLRGYLVGTLGPYVINVTRAAMACSHQRCHGHGRCAWQDPGQLKVFLHLHPGGSPGAWESFSCRCYWGWAGPTCQEPRPELGPEEAT

SEQ ID NO: 22 - protein, 449 aa, Rattus norvegicus
  hyaluronidase 1
MKPFSPEVSPDPCPATAAHLLRTYTLFLTLLELAQGCRGSMVSNRPFITVWNADTHWCLKDHGVDVDVSVFDVVANKEQNFQGPNMTIFYREELGTYPYYTPTGEPVFGGLPQNASLVTHLAHAFQDIKAAMPEPDFSGLAVIDWEAWRPRWAFNWDSKDIYQQRSMELVRAEHPDWPETLVEAEAQGQFQEAAEAWMAGTLQLGQVLRPRGLWGYYGFPDCYNYDFLSPNYTGQCSLSIHDQNDQLGWLWNQSYALYPSIYLPAALMGTGKSQMYVRYRVQEAFRLALVSRDPHVPIMPYVQIFYEKTDYLLPLEELEHSLGESAAQGAAGAVLWISSEKTSTKESCQAIKAYMDSTLGPFILNVTSAALLCSEALCSGRGRCVRHPSYPEALLTLSPASFSIEPTHDGRPLSLKGTLSLKDRAQMAMKFKCRCYRGWSGEWCKKQDM

SEQ ID NO: 23 - protein, 473 aa, Rattus norvegicus
  hyaluronidase 2
MRAGLGPIITLALVLEVAWASELKPTAPPIFTGRPFVVAWNVPTQECAPRHKVPLDLRAFDVEATPNEGFFNQNITTFYYDRLGLYPRFDAAGMSVHGGVPQNGSLCAHLPMLKEAVERYIQTQEPAGLAVIDWEEWRPVWVRNWQEKDVYRQSSRQLVASRHPDWPSDRIVKQAQYEFEFAARQFMLNTLRYVKAVRPQHLWGFYLFPDCYNHDYVQNWDSYTGRCPDVEVAQNDQLAWLWAENTALFPSVYLDKTLASSKHSRNFVSFRVQEALRVAHTHHANHALPVYVFTRPTYTRRLTELNQMDLISTIGESAALGSAGVIFWGDSVYASSMENCQNLKKYLTQTLVPYIVNVSWATQYCSWTQCHGHGRCVRRNPSASTFLHLSPSSFRLVPGRTPSEPQLRPEGELSEDDLSYLQMHFRCHCYLGWGGEQCQWNHKRAAGDASRAWAGAHLASLLGLVAMTLTWTL

SEQ ID NO: 24 - protein, 412 aa, Rattus norvegicus
  hyaluronidase 3
MITQLGLTLVVGLTLCLVHVQALLQVPEFPFSVLWNVPSARCKTRFGVHLPLDALGIIANHGQRFHGQNITIFYKNQFGLYPYFGPRGTAHNGGIPQAVSLDHHLAQAAHQILHNLGSSFAGLAVLDWEEWYPLWAGNWGTHRQVYQAASWAWAQQMFPDLNPQEQLHKAQTGFEQAARALMEHTLRLGQMLRPHGLWGFYRYPVCGNGWHNMASNYTGHCHPAIITRNTQLRWLWAASSALFPSIYLPPRLPPAYHQTFVRHRLEEAFRVALTGHAHPLPVLAYVRLTHRSSGRFLSLDDLMQTIGVSAALGAAGVVLWGDLSVSSSEEECWRLHDYLVGTLGPYVINVTKAATACSHQRCHGHGRCSWKDPGQMEAFLHLQPDDNLGAWKSFRCRCYLGWSGPTCLEPKP

SEQ ID NO: 25 - protein, 545 aa, Oryctolagus cuniculus
  Precursor rabbit PH20
MGVLKFKHIFFGSAVELSGVFQIVFIFLLIPCCLTANFRAPPVIPNVPFLWAWNAPTEFCLGKSGEPLDMSLFSLFGSPRKNKTGQGITIFYVDRLGYYPYIDPHTGAIVHGRIPQLGPLQQHLTKLRQEILYYMPKDNVGLAVIDWEEWLPTWLRNWKPKDIYRIKSIELVKSQHPQYNHSYATEKAKRDFEKAGKDFMEETLKLGRLLRPNHLWGYYLFPDCYNHHYDKPNLYKGSCFDIEKKRNDDLSWLWKESTALFPSVYLTSRARSATALSKLYVVRNRVHEAIRVSKIPDDKSPLPNFVYTRLVFTDQIFQFLSHHDLVYTIGEIVALGASGIVVWGSQSLARSMKSCLHLDNYMKTILNPYLINVTLAAKMCNQVLCQEQGVCTRKNWNPNDYLHLNPGNFAIQLGSNGTYKVDGKPTLTDLEQFSKNFQCSCYTNLNCKERTDMNNVRTVNVCAVENVCIDTNVGPQAVTYAPKEKKDVAHILSNTTSINSSTTMSLPFPRKHVSGCLLVLCMYSQYLNICYRLVAIGIQHGYYLK

SEQ ID NO: 26 - protein, 476 aa, Ovis aries
  hyaluronidase 2
MWTGLGPAVTLALVLVVAWATELKPTAPPIFTGRPFVVAWDVPTQDCGPRHKMPLDPKDMKAFDVQASPNEGFVNQNITIFYRDRLGMYPHFNSVGRSVHGGVPQNGSLWVHLEMLKGHVEHYIRTQEPAGLAVIDWEDWRPVWVRNWQDKDVYRRLSRQLVASHHPDWPPERIVKEAQYEFEFAARQFMLETLRFVKAFRPRHLWGFYLFPDCYNHDYVQNWETYTGRCPDVEVSRNDQLSWLWAESTALFPSVYLEETLASSTHGRNFVSFRVQEALRVADVHHANHALPVYVFTRPTYSRGLTGLSEMDLISTIGESAALGAAGVILWGDAGFTTSNETCRRLKDYLTRSLVPYVVNVSWAAQYCSWAQCHGHGRCVRRDPNAHTFLHLSASSFRLVPSHAPDEPRLRPEGELSWADRNHLQTHFRCQCYLGWGGEQCQWDRRRAAGGASGAWAGSHLTGLLAVAVLAFTWTS

SEQ ID NO: 27 - protein, 114 aa, Ovis aries
  PH20 partial sequence
LYVRNRVREAIRLSKIASVESPLPVFVYHRPVFTDGSSTYLSQGDLVNSVGEIVALGASGIIMWGSLNLSLTMQSCMNLGNYLNTTLNPYIINVTLAAKMCSQVLCQEQGVCIR

SEQ ID NO: 28 - protein, 414 aa, Pongo pygmaeus
  hyaluronidase 3
MTTRLGPALVLGVALCLGCGQPLPQVPERPFSVLWNVPSAHCKSRFGVHLPLNALGIIANRGQHFHGQNMTIFYKNQLGLYPYFGPKGTAHNGGIPQALPLDRHLALAAYQIHHSLRPGFAGPAVLDWEEWCPLWAGNWGRRRAYQAASWAWAQQVFPDLDPQEQLYKAYTGFEQAARALMEDTLRVAQALRPHGLWGFYHYPACGNGWHSMASNYTGRCHAATLARNTQLHWLWAASSALFPSIYLPPRLPPAHHQAFVRHRLEEAFRVALVGHLPVLAYVRLTHRRSGRFLSQDDLVQTIGVSAALGAAGVVLWGDLSLSSSEEECWHLHDYLVDTLGPYGINVTRAAMACSHQRCHGHGRCARRDPGQMEAFLHLWPDGSLGDWKSFSCHCYWGWAGPTCQEPRLGPKEAV

SEQ ID NO: 29 - protein, 510 aa, Macaca fascicularis
  Precursor Cynomolgus monkey PH20
MGVLKFKHIFFRSFVKSSGVSQIVFTFLLIPCCLTLNFRAPPIIPNVPFLWAWNAPSEFCLGKFNEPLDMSLFTLMGSPRINVTGQGVTIFYVDRLGYYPYIDLTTGVTVHGGIPQKVSLQDHLDKSKQDILFYMPVDNLGMAVIDWEEWRPTWARNWKPKDVYKNRSIELVQQQNVQLSLPQATDKAKQEFEKAGKDFMLETIKLGRSLRPNHLWGYYLFPDCYNHHYRKPGYNGSCFDVEIKRNDDLSWLWNESTALYPSIYLNTQQSVVVATLYVRNRVREAIRVSKIPDAKNPLPVFVYARLVFTDQVLKFLSREELVSTLGETVALGASGIVIWGSLSITRSMKSCLLLDTYMETILNPYIINVTLAAKMCSQVLCQEQGVCIRKDWNSSDYLHLNPDNFDIRLEKGGKFTVHGKPTVEDLEEFSEKFYCSCYTNLSCKEKADVKDTDAVDVCIADGVCIDASLKPPVETEGSPPIFYNTSSSTVSTTMFIVNILFLIISSVASL

SEQ ID NO: 30 - protein, 529 aa, Cavia porcellus
  Precursor guinea pig PH20
MGAFTFKHSFFGSFVECSGVLQTVFIFLLIPCCLADKRAPPLIPNVPLLWVWNAPTEFCIGGTNQPLDMSFFSIVGTPRKNITGQSITLYYVDRLGYYPYIDPHTGAIVHGGLPQLMNLQQHLRKSRQDILFYMPTDSVGLAVIDWEEWRPTWTRNWRPKDIYRNKSIELVKSQHPQYNHSYAVAVAKRDFERTGKAFMLETLKLGKSLRPSSLWGYYLFPDCYNTHFTKPNYDGHCPPIELQRNNDLQWLWNDSTALYPSVYLTSRVRSSQNGALYVRNRVHESIRVSKLMDDKNPLPIYVYIRLVFTDQTTTFLELDDLVHSVGEIVPLGVSGIIIWGSLSLTRSLVSCIGLENYMKGTLLPYLINVTLAAKMCGQVLCKNQGICTRKDWNTNTYLHLNATNFDIELQQNGKFVVHGKPSLEDLQEFSKNFHCSCYTNVACKDRLDVHNVRSVNVCTANNICIDAVLNFPSLDDDDEPPITDDTSQNQDSISDITSSAPPSSHILPKDLSWCLFLLSIFSQHWKYLL

SEQ ID NO: 31 - protein, 512 aa, Rattus norvegicus
  Precursor rat PH20
MGELQFKWLFWRSFAESGGTFQTVLIFLFIPYSLTVDYRATPVLSDTTFVWVWNVPTEACVENVTEPIDLSFFSLIGSPRKTAIGQPVTLFYVDRLGNYPHIDAQQTEHHGGIPQKGDLTTHLVKAKEDVERYIPTDKLGLAIIDWEEWRPTWMRNWTPKDIYRNKSIELVQAADPAINITEATVRAKAQFEGAAKEFMEGTLKLGKHIRPKHLWGFYLFPDCYNNKFQVDNYDGQCPDVEKKRNDDLDWLWKESTGLYPSVYLKKDLKSSRKATLYVRYRVLESIRVSKVSDESNPVPIFVYIRLVFTDHVSEYLLEDDLVNTIGEIVAQGTSGIIIWDAMSLAQRSAGCPILRQYMKTTLNPYIVNVTLAAKMCSQTLCKEKGMCSRKTESSDAYLHLDPSSFSINVTEAGKYEVLGKPEVKDLEYFSEHFKCSCFSKMTCEETSDMRSIQDVNVCMGDNVCIKATLGPNSAFHLLPGKGLLLMTTLAHILHHLPHDIFVFPWKMLVSTP

SEQ ID NO: 32 - protein, 512 aa, Mus musculus
  Precursor mouse PH20
MGELRFKHLFWGSFVESGGTFQTVLIFLLIPCSLTVDYRAAPILSNTTFLWIWNVPTERCVGNVNDPIDLSFFSLIGSPRKTATGQPVTLFYVDRLGLYPHIDANQAEHYGGIPQRGDYQAHLRKAKTDIEHYIPDDKLGLAIIDWEEWRPTWLRNWKPKDNYRNKSIELVQSTNPGLSITEATQKAIQQFEEAGRKFMEGTLHLGKFLRPNQLWGYYLFPDCYNNKFQDPKYDGQCPAVEKKRNDNLKWLWKASTGLYPSVYLKKDLKSNRQATLYVRYRVVEAIRVSKVGNASDPVPIFVYIRLVFTDRTSEYLLEDDLVNTIGEIVALGTSGIIIWDAMSLAQRAAGCPILHKYMQTTLNPYIVNVTLAAKMCSQTLCNEKGMCSRRKESSDVYLHLNPSHFDIMLTETGKYEVLGNPRVGDLEYFSEHFKCSCFSRMTCKETSDVKNVQDVNVCVGDNVCIKAKVEPNPAFYLLPGKSLLFMTTLGHVLYHLPQDIFVFPRKTLVSTP

SEQ ID NO: 33 - protein, 807 aa, Staphylococcus aureus
  hyaluronidase
MTYRIKKWQKLSTITLLMAGVITLNGGEFRSVDKHQIAVADTNVQTPDYEKLRNTWLDVNYGYDKYDENNPDMKKKFDATEKEATNLLKEMKTESGRKYLWSGAETLETNSSHMTRTYRNIEKIAEAMRNPKTTLNTDENKKKVKDALEWLHKNAYGKEPDKKVKELSENFTKTTGKNTNLNWWDYEIGTPKSLTNTLILLNDQFSNEEKKKFTAPIKTFAPDSDKILSSVGKAELAKGGNLVDISKVKLLECIIEEDKDMMKKSIDSFNKVFTYVQDSATGKERNGFYKDGSYIDHQDVPYTGAYGVVLLEGISQMMPMIKETPFNDKTQNDTTLKSWIDDGFMPLIYKGEMMDLSRGRAISRENETSHSASATVMKSLLRLSDAMDDSTKAKYKKIVKSSVESDSSYKQNDYLNSYSDIDKMKSLMTDNSISKNGLTQQLKIYNDMDRVTYHNKDLDFAFGLSMTSKNVARYESINGENLKGWHTGAGMSYLYNSDVKHYHDNFWVTADMKRLSGTTTLDNEILKDTDDKKSSKTFVGGTKVDDQHASIGMDFENQDKTLTAKKSYFILNDKIVFLGTGIKSTDSSKNPVTTIENRKANGYTLYTDDKQTTNSDNQENNSVFLESTDTKKNIGYHFLNKPKITVKKESHTGKWKEINKSQKDTQKTDEYYEVTQKHSNSDNKYGYVLYPGLSKDVFKTKKDEVTVVKQEDDFHVVKDNESVWAGVNYSNSTQTFDINNTKVEVKAKGMFILKKKDDNTYECSFYNPESTNSASDIESKISMTGYSITNKNTSTSNESGVHFELTK

SEQ ID NO: 34 - protein, 371 aa, Streptococcus pyogenes bacteriophage H4489A
  hyaluronidase
MTENIPLRVQFKRMSADEWARSDVILLEGEIGFETDTGFAKFGDGQNTFSKLKYLTGPKGPKGDTGLQGKTGGTGPRGPAGKPGTTDYDQLQNKPDLGAFAQKEETNSKITKLESSKADKSAVYSKAESKIELDKKLSLTGGIVTGQLQFKPNKSGIKPSSSVGGAINIDMSKSEGAAMVMYTNKDTTDGPLMILRSDKDTFDQSAQFVDYSGKTNAVNIVMRQPSAPNFSSALNITSANEGGSAMQIRGVEKALGTLKITHENPNVEAKYDENAAALSIDIVKKQKGGKGTAAQGIYINSTSGTAGKMLRIRNKNEDKFYVGPDGGFHSGANSTVAGNLTVKDPTSGKHAATKDYVDEKIAELKKLILKK

SEQ ID NO: 35 - protein, 1628 aa, Clostridium perfringens
  hyaluronidase
MNKNIRKIITSTVLAAMTISVLPSNLVVFATDGITENFYEIYPKPQEISYSGGEFQISDEINIVYDDGIDTYTKKRVDEVLEASNLEATVSNEIVPGKTNFLVGINESGGVVDNYFNKNIPHDESFFDEKMDANIVSVKDGVIGVIGEDTDSAFYGVTTLKHVFNQLEEGNKIQSFRADDYAEVAHRGFIEGYYGNPWSNEDRAELMKFGGDYKLNQYVFAPKDDPYHNSKWRDLYPEEKLSEIKKLAQVGNETKNRYVYALHPFMNNPVRFDTEENYQNDLGVIKAKFTQLLENDVRQFAILADDASAPAQGASMYVKLLTDLTRWLEEQQSTYPDLKTDLMFCPSDYYGNGSSAQLKELNKAEDNVSIVMTGGRIWGEVDENFANNFMNNISTEGHPGRAPFFWINWPCSDNSKQHLIMGGNDTFLHPGVDPSKIDGIVLNPMQQAEANKSALFAIADYAWNIWDNKEEADENWNDSFKYMDHGTAEETNSSLALREISKHMINQNMDGRVRPLQESVELAPKLEAFKQKYDSGASIKEDALELIAEFTNLQKAADYYKNNPGNERTRDQIIYWLNCWEDTMDAAIGYLKSAIAIEEGDDEAAWANYSEAQGAFEKSKTYGFHYVDHTEYAEVGVQHIVPFIKSMGQNLSVVIGSIVDPNRIIATYISNRQDAPTGNPDNIFDNNASTELVYKNPNRIDVGTYVGVKYSNPITLNNVEFLMGANSNPNDTMQKAKIQYTVDGREWIDLEEGVEYTMPGAIKVENLDLKVRGVRLIATEARENTWLGVRDINVNKKEDSNSGVEFNPSLIRSESWQVYEGNEANLLDGDDNTGVWYKTLNGDTSLAGEFIGLDLGKEIKLDGIRFVIGKNGGGSSDKWNKFKLEYSLDNESWTTIKEYDKTGAPAGKDVIEESFETPISAKYIRLTNMENINKWLTFSEFAIISDELENAGNKENVYTNTELDLLSLAKEDVTKLIPTDDISLNHGEYIGVKLNRIKDLSNINLEISNDTGLKLQSSMNGVEWTEITDKNTLEDGRYVRLINTSNEAVNFNLTKFEVNSNEVYEPSLVDAYVGDDGAKKAVDGDLKTRVKFLGAPSTGDTIVYDLGQEILVDNLKYVVLDTEVDHVRDGKIQLSLDGETWTDAITIGDGVENGVDDMFSTPLKNGYKHGNQSGGIVPIDSAYVEGDNLNQKARYVRILFTAPYRHRWTVINELMINNGEYISTVNDPTYISNPIEERGFAPSNLRDGNLTTSYKPNTNNGEISEGSITYRLSEKTDVRKVTIVQSGSSISNAKVMARVGDGSENVTDQWVQLGTLSNSLNEFINRDYNNIYEIKIEWTDVAPNIYEIITLNQEFEFPVNDSLKAKYDELINLSGDEYTLSSFETLKEALNEAKSILDDSNSSQKKIDKALEKLNKAEERLDLRATDFEDFNKVLTLGNSLVEEEYTAESWALFSEVLEAANEANKNKADYTQDQINQIVIDLDASIKALVKETPEVDKTNLGELINQGKSLLDESVEGFNVGEYHKGAKDGLTVEINKAEEVFNKEDATEEEINLAKESLEGAIARFNSLLIEESTGDFNGNGKIDIGDLAMVSKNIGSTTNTSLDLNKDGSIDEYEISFINHRILN

SEQ ID NO: 36 - protein, 435 aa, Homo sapiens
  Hyaluronidase-1 [Precursor]
MAAHLLPICALFLTLLDMAQGFRGPLLPNRPFTTVWNANTQWCLERHGVDVDVSVFDVVANPGQTFRGPDMTIFYSSQLGTYPYYTPTGEPVFGGLPQNASLIAHLARTFQDILAAIPAPDFSGLAVIDWEAWRPRWAFNWDTKDIYRQRSRALVQAQHPDWPAPQVEAVAQDQFQGAARAWMAGTLQLGRALRPRGLWGFYGFPDCYNYDFLSPNYTGQCPSGIRAQNDQLGWLWGQSRALYPSIYMPAVLEGTGKSQMYVQHRVAEAFRVAVAAGDPNLPVLPYVQIFYDTTNHFLPLDELEHSLGESAAQGAAGVVLWVSWENTRTKESCQAIKEYMDTTLGPFILNVTSGALLCSQALCSGHGRCVRRTSHPKALLLLNPASFSIQLTPGGGPLSLRGALSLEDQAQMAVEFKCRCYPGWQAPWCERKSMW

SEQ ID NO: 37 - protein, 473 aa, Homo sapiens
  Hyaluronidase-2 [Precursor]
MRAGPGPTVTLALVLAVAWAMELKPTAPPIFTGRPFVVAWDVPTQDCGPRLKVPLDLNAFDVQASPNEGFVNQNITIFYRDRLGLYPRFDSAGRSVHGGVPQNVSLWAHRKMLQKRVEHYIRTQESAGLAVIDWEDWRPVWVRNWQDKDVYRRLSRQLVASRHPDWPPDRIVKQAQYEFEFAAQQFMLETLRYVKAVRPRHLWGFYLFPDCYNHDYVQNWESYTGRCPDVEVARNDQLAWLWAESTALFPSVYLDETLASSRHGRNFVSFRVQEALRVARTHHANHALPVYVFTRPTYSRRLTGLSEMDLISTIGESAALGAAGVILWGDAGYTTSTETCQYLKDYLTRLLVPYVVNVSWATQYCSRAQCHGHGRCVRRNPSASTFLHLSTNSFRLVPGHAPGEPQLRPVGELSWADIDHLQTHFRCQCYLGWSGEQCQWDHRQAAGGASEAWAGSHLTSLLALAALAFTWTL

SEQ ID NO: 38 - protein, 417 aa, Homo sapiens
  Hyaluronidase-3 [Precursor]
MTTQLGPALVLGVALCLGCGQPLPQVPERPFSVLWNVPSAHCEARFGVHLPLNALGIIANRGQHFHGQNMTIFYKNQLGLYPYFGPRGTAHNGGIPQALPLDRHLALAAYQIHHSLRPGFAGPAVLDWEEWCPLWAGNWGRRRAYQAASWAWAQQVFPDLDPQEQLYKAYTGFEQAARALMEDTLRVAQALRPHGLWGFYHYPACGNGWHSMASNYTGRCHAATLARNTQLHWLWAASSALFPSIYLPPRLPPAHHQAFVRHRLEEAFRVALVGHRHPLPVLAYVRLTHRRSGRFLSQDDLVQSIGVSAALGAAGVVLWGDLSLSSSEEECWHLHDYLVDTLGPYVINVTRAAMACSHQRCHGHGRCARRDPGQMEAFLHLWPDGSLGDWKSFSCHCYWGWAGPTCQEPRPGPKEAV

SEQ ID NO: 39 - protein, 481 aa, Homo sapiens
  Hyaluronidase-4
MKVLSEGQLKLCVVQPVHLTSWLLIFFILKSISCLKPARLPIYQRKPFIAAWNAPTDQCLIKYNLRLNLKMFPVIGSPLAKARGQNVTIFYVNRLGYYPWYTSQGVPINGGLPQNISLQVHLEKADQDINYYIPAEDFSGLAVIDWEYWRPQWARNWNSKDVYRQKSRKLISDMGKNVSATDIEYLAKVTFEESAKAFMKETIKLGIKSRPKGLWGYYLYPDCHNYNVYAPNYSGSCPEDEVLRNNELSWLWNSSAALYPSIGVWKSLGDSENILRFSKFRVHESMRISTMTSHDYALPVFVYTRLGYRDEPLFFLSKQDLVSTIGESAALGAAGIVIWGDMNLTASKANCTKVKQFVSSDLGSYIANVTRAAEVCSLHLCRNNGRCIRKMWNAPSYLHLNPASYHIEASEDGEFTVKGKASDTDLAVMADTFSCHCYQGYEGADCREIKTADGCSGVSPSPGSLMTLCLLLLASYRSIQL

SEQ ID NO: 40 - protein, 467 aa, Homo sapiens
  PH20 precursor 1-467
MGVLKFKHIFFRSFVKSSGVSQIVFTFLLIPCCLTLNFRAPPVIPNVPFLWAWNAPSEFCLGKFDEPLDMSLFSFIGSPRINATGQGVTIFYVDRLGYYPYIDSITGVTVNGGIPQKISLQDHLDKAKKDITFYMPVDNLGMAVIDWEEWRPTWARNWKPKDVYKNRSIELVQQQNVQLSLTEATEKAKQEFEKAGKDFLVETIKLGKLLRPNHLWGYYLFPDCYNHHYKKPGYNGSCFNVEIKRNDDLSWLWNESTALYPSIYLNTQQSPVAATLYVRNRVREAIRVSKIPDAKSPLPVFAYTRIVFTDQVLKFLSQDELVYTFGETVALGASGIVIWGTLSIMRSMKSCLLLDNYMETILNPYIINVTLAAKMCSQVLCQEQGVCIRKNWNSSDYLHLNPDNFAIQLEKGGKFTVRGKPTLEDLEQFSEKFYCSCYSTLSCKEKADVKDTDAVDVCIADGVCIDA

SEQ ID NO: 41 - protein, 477 aa, Homo sapiens
  PH20 precursor 1-477
MGVLKFKHIFFRSFVKSSGVSQIVFTFLLIPCCLTLNFRAPPVIPNVPFLWAWNAPSEFCLGKFDEPLDMSLFSFIGSPRINATGQGVTIFYVDRLGYYPYIDSITGVTVNGGIPQKISLQDHLDKAKKDITFYMPVDNLGMAVIDWEEWRPTWARNWKPKDVYKNRSIELVQQQNVQLSLTEATEKAKQEFEKAGKDFLVETIKLGKLLRPNHLWGYYLFPDCYNHHYKKPGYNGSCFNVEIKRNDDLSWLWNESTALYPSIYLNTQQSPVAATLYVRNRVREAIRVSKIPDAKSPLPVFAYTRIVFTDQVLKFLSQDELVYTFGETVALGASGIVIWGTLSIMRSMKSCLLLDNYMETILNPYIINVTLAAKMCSQVLCQEQGVCIRKNWNSSDYLHLNPDNFAIQLEKGGKFTVRGKPTLEDLEQFSEKFYCSCYSTLSCKEKADVKDTDAVDVCIADGVCIDAFLKPPMETEE

SEQ ID NO: 42 - protein, 478 aa, Homo sapiens
  PH20 precursor 1-478
MGVLKFKHIFFRSFVKSSGVSQIVFTFLLIPCCLTLNFRAPPVIPNVPFLWAWNAPSEFCLGKFDEPLDMSLFSFIGSPRINATGQGVTIFYVDRLGYYPYIDSITGVTVNGGIPQKISLQDHLDKAKKDITFYMPVDNLGMAVIDWEEWRPTWARNWKPKDVYKNRSIELVQQQNVQLSLTEATEKAKQEFEKAGKDFLVETIKLGKLLRPNHLWGYYLFPDCYNHHYKKPGYNGSCFNVEIKRNDDLSWLWNESTALYPSIYLNTQQSPVAATLYVRNRVREAIRVSKIPDAKSPLPVFAYTRIVFTDQVLKFLSQDELVYTFGETVALGASGIVIWGTLSIMRSMKSCLLLDNYMETILNPYIINVTLAAKMCSQVLCQEQGVCIRKNWNSSDYLHLNPDNFAIQLEKGGKFTVRGKPTLEDLEQFSEKFYCSCYSTLSCKEKADVKDTDAVDVCIADGVCIDAFLKPPMETEEP

SEQ ID NO: 43 - protein, 479 aa, Homo sapiens
  PH20 precursor 1-479
MGVLKFKHIFFRSFVKSSGVSQIVFTFLLIPCCLTLNFRAPPVIPNVPFLWAWNAPSEFCLGKFDEPLDMSLFSFIGSPRINATGQGVTIFYVDRLGYYPYIDSITGVTVNGGIPQKISLQDHLDKAKKDITFYMPVDNLGMAVIDWEEWRPTWARNWKPKDVYKNRSIELVQQQNVQLSLTEATEKAKQEFEKAGKDFLVETIKLGKLLRPNHLWGYYLFPDCYNHHYKKPGYNGSCFNVEIKRNDDLSWLWNESTALYPSIYLNTQQSPVAATLYVRNRVREAIRVSKIPDAKSPLPVFAYTRIVFTDQVLKFLSQDELVYTFGETVALGASGIVIWGTLSIMRSMKSCLLLDNYMETILNPYIINVTLAAKMCSQVLCQEQGVCIRKNWNSSDYLHLNPDNFAIQLEKGGKFTVRGKPTLEDLEQFSEKFYCSCYSTLSCKEKADVKDTDAVDVCIADGVCIDAFLKPPMETEEPQ

SEQ ID NO: 44 - protein, 480 aa, Homo sapiens
  PH20 precursor 1-480
MGVLKFKHIFFRSFVKSSGVSQIVFTFLLIPCCLTLNFRAPPVIPNVPFLWAWNAPSEFCLGKFDEPLDMSLFSFIGSPRINATGQGVTIFYVDRLGYYPYIDSITGVTVNGGIPQKISLQDHLDKAKKDITFYMPVDNLGMAVIDWEEWRPTWARNWKPKDVYKNRSIELVQQQNVQLSLTEATEKAKQEFEKAGKDFLVETIKLGKLLRPNHLWGYYLFPDCYNHHYKKPGYNGSCFNVEIKRNDDLSWLWNESTALYPSIYLNTQQSPVAATLYVRNRVREAIRVSKIPDAKSPLPVFAYTRIVFTDQVLKFLSQDELVYTFGETVALGASGIVIWGTLSIMRSMKSCLLLDNYMETILNPYIINVTLAAKMCSQVLCQEQGVCIRKNWNSSDYLHLNPDNFAIQLEKGGKFTVRGKPTLEDLEQFSEKFYCSCYSTLSCKEKADVKDTDAVDVCIADGVCIDAFLKPPMETEEPQI

SEQ ID NO: 45 - protein, 481 aa, Homo sapiens
  PH20 precursor 1-481
MGVLKFKHIFFRSFVKSSGVSQIVFTFLLIPCCLTLNFRAPPVIPNVPFLWAWNAPSEFCLGKFDEPLDMSLFSFIGSPRINATGQGVTIFYVDRLGYYPYIDSITGVTVNGGIPQKISLQDHLDKAKKDITFYMPVDNLGMAVIDWEEWRPTWARNWKPKDVYKNRSIELVQQQNVQLSLTEATEKAKQEFEKAGKDFLVETIKLGKLLRPNHLWGYYLFPDCYNHHYKKPGYNGSCFNVEIKRNDDLSWLWNESTALYPSIYLNTQQSPVAATLYVRNRVREAIRVSKIPDAKSPLPVFAYTRIVFTDQVLKFLSQDELVYTFGETVALGASGIVIWGTLSIMRSMKSCLLLDNYMETILNPYIINVTLAAKMCSQVLCQEQGVCIRKNWNSSDYLHLNPDNFAIQLEKGGKFTVRGKPTLEDLEQFSEKFYCSCYSTLSCKEKADVKDTDAVDVCIADGVCIDAFLKPPMETEEPQIF

SEQ ID NO: 46 - protein, 483 aa, Homo sapiens
  PH20 precursor 1-483
MGVLKFKHIFFRSFVKSSGVSQIVFTFLLIPCCLTLNFRAPPVIPNVPFLWAWNAPSEFCLGKFDEPLDMSLFSFIGSPRINATGQGVTIFYVDRLGYYPYIDSITGVTVNGGIPQKISLQDHLDKAKKDITFYMPVDNLGMAVIDWEEWRPTWARNWKPKDVYKNRSIELVQQQNVQLSLTEATEKAKQEFEKAGKDFLVETIKLGKLLRPNHLWGYYLFPDCYNHHYKKPGYNGSCFNVEIKRNDDLSWLWNESTALYPSIYLNTQQSPVAATLYVRNRVREAIRVSKIPDAKSPLPVFAYTRIVFTDQVLKFLSQDELVYTFGETVALGASGIVIWGTLSIMRSMKSCLLLDNYMETILNPYIINVTLAAKMCSQVLCQEQGVCIRKNWNSSDYLHLNPDNFAIQLEKGGKFTVRGKPTLEDLEQFSEKFYCSCYSTLSCKEKADVKDTDAVDVCIADGVCIDAFLKPPMETEEPQIFYN

SEQ ID NO: 47 - protein, 432 aa, Homo sapiens
  PH20 mature 36-467
LNFRAPPVIPNVPFLWAWNAPSEFCLGKFDEPLDMSLFSFIGSPRINATGQGVTIFYVDRLGYYPYIDSITGVTVNGGIPQKISLQDHLDKAKKDITFYMPVDNLGMAVIDWEEWRPTWARNWKPKDVYKNRSIELVQQQNVQLSLTEATEKAKQEFEKAGKDFLVETIKLGKLLRPNHLWGYYLFPDCYNHHYKKPGYNGSCFNVEIKRNDDLSWLWNESTALYPSIYLNTQQSPVAATLYVRNRVREAIRVSKIPDAKSPLPVFAYTRIVFTDQVLKFLSQDELVYTFGETVALGASGIVIWGTLSIMRSMKSCLLLDNYMETILNPYIINVTLAAKMCSQVLCQEQGVCIRKNWNSSDYLHLNPDNFAIQLEKGGKFTVRGKPTLEDLEQFSEKFYCSCYSTLSCKEKADVKDTDAVDVCIADGVCIDA

SEQ ID NO: 48 - protein, 448 aa, Homo sapiens
  PH20 mature 36-483
LNFRAPPVIPNVPFLWAWNAPSEFCLGKFDEPLDMSLFSFIGSPRINATGQGVTIFYVDRLGYYPYIDSITGVTVNGGIPQKISLQDHLDKAKKDITFYMPVDNLGMAVIDWEEWRPTWARNWKPKDVYKNRSIELVQQQNVQLSLTEATEKAKQEFEKAGKDFLVETIKLGKLLRPNHLWGYYLFPDCYNHHYKKPGYNGSCFNVEIKRNDDLSWLWNESTALYPSIYLNTQQSPVAATLYVRNRVREAIRVSKIPDAKSPLPVFAYTRIVFTDQVLKFLSQDELVYTFGETVALGASGIVIWGTLSIMRSMKSCLLLDNYMETILNPYIINVTLAAKMCSQVLCQEQGVCIRKNWNSSDYLHLNPDNFAIQLEKGGKFTVRGKPTLEDLEQFSEKFYCSCYSTLSCKEKADVKDTDAVDVCIADGVCIDAFLKPPMETEEPQIFYN

SEQ ID NO: 49 - DNA, 1446 bp, Homo sapiens
  DNA encoding soluble rHuPH20 "precursor"
atgggagtgctaaaattcaagcacatctttttcagaagctttgttaaatcaagtggagtatcccagatagttttcaccttccttctgattccatgttgcttgactctgaatttcagagcacctcctgttattccaaatgtgcctttcctctgggcctggaatgccccaagtgaattttgtcttggaaaatttgatgagccactagatatgagcctcttctctttcataggaagcccccgaataaacgccaccgggcaaggtgttacaatattttatgttgatagacttggctactatccttacatagattcaatcacaggagtaactgtgaatggaggaatcccccagaagatttccttacaagaccatctggacaaagctaagaaagacattacattttatatgccagtagacaatttgggaatggctgttattgactgggaagaatggagacccacttgggcaagaaactggaaacctaaagatgtttacaagaataggtctattgaattggttcagcaacaaaatgtacaacttagtctcacagaggccactgagaaagcaaaacaagaatttgaaaaggcagggaaggatttcctggtagagactataaaattgggaaaattacttcggccaaatcacttgtggggttattatctttttccggattgttacaaccatcactataagaaacccggttacaatggaagttgcttcaatgtagaaataaaaagaaatgatgatctcagctggttgtggaatgaaagcactgctctttacccatccatttatttgaacactcagcagtctcctgtagctgctacactctatgtgcgcaatcgagttcgggaagccatcagagtttccaaaatacctgatgcaaaaagtccacttccggtttttgcatatacccgcatagtttttactgatcaagttttgaaattcctttctcaagatgaacttgtgtatacatttggcgaaactgttgctctgggtgcttctggaattgtaatatggggaaccctcagtataatgcgaagtatgaaatcttgcttgctcctagacaattacatggagactatactgaatccttacataatcaacgtcacactagcagccaaaatgtgtagccaagtgctttgccaggagcaaggagtgtgtataaggaaaaactggaattcaagtgactatcttcacctcaacccagataattttgctattcaacttgagaaaggtggaaagttcacagtacgtggaaaaccgacacttgaagacctggagcaattttctgaaaaattttattgcagctgttatagcaccttgagttgtaaggagaaagctgatgtaaaagacactgatgctgttgatgtgtgtattgctgatggtgtctgtatagatgcttttctaaaacctcccatggagacagaagaacctcaaattttctac

SEQ ID NO: 50 - protein, 509 aa, Homo sapiens
  PH20 variant P48A
MGVLKFKHIFFRSFVKSSGVSQIVFTFLLIPCCLTLNFRAPPVIPNVAFLWAWNAPSEFCLGKFDEPLDMSLFSFIGSPRINATGQGVTIFYVDRLGYYPYIDSITGVTVNGGIPQKISLQDHLDKAKKDITFYMPVDNLGMAVIDWEEWRPTWARNWKPKDVYKNRSIELVQQQNVQLSLTEATEKAKQEFEKAGKDFLVETIKLGKLLRPNHLWGYYLFPDCYNHHYKKPGYNGSCFNVEIKRNDDLSWLWNESTALYPSIYLNTQQSPVAATLYVRNRVREAIRVSKIPDAKSPLPVFAYTRIVFTDQVLKFLSQDELVYTFGETVALGASGIVIWGTLSIMRSMKSCLLLDNYMETILNPYIINVTLAAKMCSQVLCQEQGVCIRKNWNSSDYLHLNPDNFAIQLEKGGKFTVRGKPTLEDLEQFSEKFYCSCYSTLSCKEKADVKDTDAVDVCIADGVCIDAFLKPPMETEEPQIFYNASPSTLSATMFIVSILFLIISSVASL

SEQ ID NO: 51 - protein, 509 aa, Homo sapiens
  precursor PH20 variant L499W
MGVLKFKHIFFRSFVKSSGVSQIVFTFLLIPCCLTLNFRAPPVIPNVPFLWAWNAPSEFCLGKFDEPLDMSLFSFIGSPRINATGQGVTIFYVDRLGYYPYIDSITGVTVNGGIPQKISLQDHLDKAKKDITFYMPVDNLGMAVIDWEEWRPTWARNWKPKDVYKNRSIELVQQQNVQLSLTEATEKAKQEFEKAGKDFLVETIKLGKLLRPNHLWGYYLFPDCYNHHYKKPGYNGSCFNVEIKRNDDLSWLWNESTALYPSIYLNTQQSPVAATLYVRNRVREAIRVSKIPDAKSPLPVFAYTRIVFTDQVLKFLSQDELVYTFGETVALGASGIVIWGTLSIMRSMKSCLLLDNYMETILNPYIINVTLAAKMCSQVLCQEQGVCIRKNWNSSDYLHLNPDNFAIQLEKGGKFTVRGKPTLEDLEQFSEKFYCSCYSTLSCKEKADVKDTDAVDVCIADGVCIDAFLKPPMETEEPQIFYNASPSTLSATMFIVSIWFLIISSVASL

SEQ ID NO: 52 - DNA, 6630 bp, Artificial Sequence
  HZ24 vector
tcaatattggccattagccatattattcattggttatatagcataaatcaatattggctattggccattgcatacgttgtatctatatcataatatgtacatttatattggctcatgtccaatatgaccgccatgttggcattgattattgactagttattaatagtaatcaattacggggtcattagttcatagcccatatatggagttccgcgttacataacttacggtaaatggcccgcctggctgaccgcccaacgacccccgcccattgacgtcaataatgacgtatgttcccatagtaacgccaatagggactttccattgacgtcaatgggtggagtatttacggtaaactgcccacttggcagtacatcaagtgtatcatatgccaagtccgccccctattgacgtcaatgacggtaaatggcccgcctggcattatgcccagtacatgaccttacgggactttcctacttggcagtacatctacgtattagtcatcgctattaccatggtgatgcggttttggcagtacaccaatgggcgtggatagcggtttgactcacggggatttccaagtctccaccccattgacgtcaatgggagtttgttttggcaccaaaatcaacgggactttccaaaatgtcgtaataaccccgccccgttgacgcaaatgggcggtaggcgtgtacggtgggaggtctatataagcagagctcgtttagtgaaccgtcagatcactagaagctttattgcggtagtttatcacagttaaattgctaacgcagtcagtgcttctgacacaacagtctcgaacttaagctgcagaagttggtcgtgaggcactgggcaggtaagtatcaaggttacaagacaggtttaaggagaccaatagaaactgggcttgtcgagacagagaagactcttgcgtttctgataggcacctattggtcttactgacatccactttgcctttctctccacaggtgtccactcccagttcaattacagctcttaaggctagagtacttaatacgactcactataggctagcatgggagtgctaaaattcaagcacatctttttcagaagctttgttaaatcaagtggagtatcccagatagttttcaccttccttctgattccatgttgcttgactctgaatttcagagcacctcctgttattccaaatgtgcctttcctctgggcctggaatgccccaagtgaattttgtcttggaaaatttgatgagccactagatatgagcctcttctctttcataggaagcccccgaataaacgccaccgggcaaggtgttacaatattttatgttgatagacttggctactatccttacatagattcaatcacaggagtaactgtgaatggaggaatcccccagaagatttccttacaagaccatctggacaaagctaagaaagacattacattttatatgccagtagacaatttgggaatggctgttattgactgggaagaatggagacccacttgggcaagaaactggaaacctaaagatgtttacaagaataggtctattgaattggttcagcaacaaaatgtacaacttagtctcacagaggccactgagaaagcaaaacaagaatttgaaaaggcagggaaggatttcctggtagagactataaaattgggaaaattacttcggccaaatcacttgtggggttattatctttttccggattgttacaaccatcactataagaaacccggttacaatggaagttgcttcaatgtagaaataaaaagaaatgatgatctcagctggttgtggaatgaaagcactgctctttacccatccatttatttgaacactcagcagtctcctgtagctgctacactctatgtgcgcaatcgagttcgggaagccatcagagtttccaaaatacctgatgcaaaaagtccacttccggtttttgcatatacccgcatagtttttactgatcaagttttgaaattcctttctcaagatgaacttgtgtatacatttggcgaaactgttgctctgggtgcttctggaattgtaatatggggaaccctcagtataatgcgaagtatgaaatcttgcttgctcctagacaattacatggagactatactgaatccttacataatcaacgtcacactagcagccaaaatgtgtagccaagtgctttgccaggagcaaggagtgtgtataaggaaaaactggaattcaagtgactatcttcacctcaacccagataattttgctattcaacttgagaaaggtggaaagttcacagtacgtggaaaaccgacacttgaagacctggagcaattttctgaaaaattttattgcagctgttatagcaccttgagttgtaaggagaaagctgatgtaaaagacactgatgctgttgatgtgtgtattgctgatggtgtctgtatagatgcttttctaaaacctcccatggagacagaagaacctcaaattttctactgaggatccatagctaacgcccctctccctcccccccccctaacgttactggccgaagccgcttggaataaggccggtgtgcgtttgtctatatgttattttccaccatattgccgtcttttggcaatgtgagggcccggaaacctggccctgtcttcttgacgagcattcctaggggtctttcccctctcgccaaaggaatgcaaggtctgttgaatgtcgtgaaggaagcagttcctctggaagcttcttgaagacaaacaacgtctgtagcgaccctttgcaggcagcggaaccccccacctggcgacaggtgcctctgcggccaaaagccacgtgtataagatacacctgcaaaggcggcacaaccccagtgccacgttgtgagttggatagttgtggaaagagtcaaatggctctcctcaagcgtattcaacaaggggctgaaggatgcccagaaggtaccccattgtatgggatctgatctggggcctcggtgcacatgctttacatgtgtttagtcgaggttaaaaaaacgtctaggccccccgaaccacggggacgtggttttcctttgaaaaacacgatgataagcttgccacaacccacagcggccgctgccatcatggttcgaccattgaactgcatcgtcgccgtgtcccaaaatatggggattggcaagaacggagacctaccctggcctccgctcaggaacgagttcaagtacttccaaagaatgaccacaacctcttcagtggaaggtaaacagaatctggtgattatgggtaggaaaacctggttctccattcctgagaagaatcgacctttaaaggacagaattaatatagttctcagtagagaactcaaagaaccaccacgaggagctcattttcttgccaaaagtttggatgatgccttaagacttattgaacaaccggaattggcaagtaaagtagacatggtttggatagtcggaggcagttctgtttaccaggaagccatgaatcaaccaggccacctcagactctttgtgacaaggatcatgcaggaatttgaaagtgacacgtttttcccagaaattgatttggggaaatataaacttctcccagaatacccaggcgtcctctctgaggtccaggaggaaaaaggcatcaagtataagtttgaagtctacgagaagaaagactaaacgcgtggtacctctagagtcgacccgggcggccgcttcgagcagacatgataagatacattgatgagtttggacaaaccacaactagaatgcagtgaaaaaaatgctttatttgtgaaatttgtgatgctattgctttatttgtaaccattataagctgcaataaacaagttaacaacaacaattgcattcattttatgtttcaggttcagggggagatgtgggaggttttttaaagcaagtaaaacctctacaaatgtggtaaaatcgataaggatccgggctggcgtaatagcgaagaggcccgcaccgatcgcccttcccaacagttgcgcagcctgaatggcgaatggacgcgccctgtagcggcgcattaagcgcggcgggtgtggtggttacgcgcagcgtgaccgctacacttgccagcgccctagcgcccgctcctttcgctttcttcccttcctttctcgccacgttcgccggctttccccgtcaagctctaaatcgggggctccctttagggttccgatttagtgctttacggcacctcgaccccaaaaaacttgattagggtgatggttcacgtagtgggccatcgccctgatagacggtttttcgccctttgacgttggagtccacgttctttaatagtggactcttgttccaaactggaacaacactcaaccctatctcggtctattcttttgatttataagggattttgccgatttcggcctattggttaaaaaatgagctgatttaacaaaaatttaacgcgaattttaacaaaatattaacgcttacaatttcctgatgcggtattttctccttacgcatctgtgcggtatttcacaccgcatatggtgcactctcagtacaatctgctctgatgccgcatagttaagccagccccgacacccgccaacacccgctgacgcgccctgacgggcttgtctgctcccggcatccgcttacagacaagctgtgaccgtctccgggagctgcatgtgtcagaggttttcaccgtcatcaccgaaacgcgcgagacgaaagggcctcgtgatacgcctatttttataggttaatgtcatgataataatggtttcttagacgtcaggtggcacttttcggggaaatgtgcgcggaacccctatttgtttatttttctaaatacattcaaatatgtatccgctcatgagacaataaccctgataaatgcttcaataatattgaaaaaggaagagtatgagtattcaacatttccgtgtcgcccttattcccttttttgcggcattttgccttcctgtttttgctcacccagaaacgctggtgaaagtaaaagatgctgaagatcagttgggtgcacgagtgggttacatcgaactggatctcaacagcggtaagatccttgagagttttcgccccgaagaacgttttccaatgatgagcacttttaaagttctgctatgtggcgcggtattatcccgtattgacgccgggcaagagcaactcggtcgccgcatacactattctcagaatgacttggttgagtactcaccagtcacagaaaagcatcttacggatggcatgacagtaagagaattatgcagtgctgccataaccatgagtgataacactgcggccaacttacttctgacaacgatcggaggaccgaaggagctaaccgcttttttgcacaacatgggggatcatgtaactcgccttgatcgttgggaaccggagctgaatgaagccataccaaacgacgagcgtgacaccacgatgcctgtagcaatggcaacaacgttgcgcaaactattaactggcgaactacttactctagcttcccggcaacaattaatagactggatggaggcggataaagttgcaggaccacttctgcgctcggcccttccggctggctggtttattgctgataaatctggagccggtgagcgtgggtctcgcggtatcattgcagcactggggccagatggtaagccctcccgtatcgtagttatctacacgacggggagtcaggcaactatggatgaacgaaatagacagatcgctgagataggtgcctcactgattaagcattggtaactgtcagaccaagtttactcatatatactttagattgatttaaaacttcatttttaatttaaaaggatctaggtgaagatcctttttgataatctcatgaccaaaatcccttaacgtgagttttcgttccactgagcgtcagaccccgtagaaaagatcaaaggatcttcttgagatcctttttttctgcgcgtaatctgctgcttgcaaacaaaaaaaccaccgctaccagcggtggtttgtttgccggatcaagagctaccaactctttttccgaaggtaactggcttcagcagagcgcagataccaaatactgttcttctagtgtagccgtagttaggccaccacttcaagaactctgtagcaccgcctacatacctcgctctgctaatcctgttaccagtggctgctgccagtggcgataagtcgtgtcttaccgggttggactcaagacgatagttaccggataaggcgcagcggtcgggctgaacggggggttcgtgcacacagcccagcttggagcgaacgacctacaccgaactgagatacctacagcgtgagctatgagaaagcgccacgcttcccgaagggagaaaggcggacaggtatccggtaagcggcagggtcggaacaggagagcgcacgagggagcttccagggggaaacgcctggtatctttatagtcctgtcgggtttcgccacctctgacttgagcgtcgatttttgtgatgctcgtcaggggggcggagcctatggaaaaacgccagcaacgcggcctttttacggttcctggccttttgctggccttttgctcacatggctcgacagatct

SEQ ID NO: 53 - protein, 186 aa, Mus musculus
  dihydrofolate reductase
VRPLNCIVAVSQNMGIGKNGDLPWPPLRNEFKYFQRMTTTSSVEGKQNLVIMGRKTWFSIPEKNRPLKDRINIVLSRELKEPPRGAHFLAKSLDDALRLIEQPELASKVDMVWIVGGSSVYQEAMNQPGHLRLFVTRIMQEFESDTFFPEIDLGKYKLLPEYPGVLSEVQEEKGIKYKFEVYEKKD

SEQ ID NO: 54 - protein, 6 aa, Artificial Sequence
  His tag
HHHHHH

SEQ ID NO: 55 - protein, 8 aa, Artificial Sequence
  Flag tag
DYKDDDDK

SEQ ID NO: 56 - DNA, 1449 bp, Homo sapiens
  Gen2 mRNA sequence
atgggagtgctaaaattcaagcacatctttttcagaagctttgttaaatcaagtggagtatcccagatagttttcaccttccttctgattccatgttgcttgactctgaatttcagagcacctcctgttattccaaatgtgcctttcctctgggcctggaatgccccaagtgaattttgtcttggaaaatttgatgagccactagatatgagcctcttctctttcataggaagcccccgaataaacgccaccgggcaaggtgttacaatattttatgttgatagacttggctactatccttacatagattcaatcacaggagtaactgtgaatggaggaatcccccagaagatttccttacaagaccatctggacaaagctaagaaagacattacattttatatgccagtagacaatttgggaatggctgttattgactgggaagaatggagacccacttgggcaagaaactggaaacctaaagatgtttacaagaataggtctattgaattggttcagcaacaaaatgtacaacttagtctcacagaggccactgagaaagcaaaacaagaatttgaaaaggcagggaaggatttcctggtagagactataaaattgggaaaattacttcggccaaatcacttgtggggttattatctttttccggattgttacaaccatcactataagaaacccggttacaatggaagttgcttcaatgtagaaataaaaagaaatgatgatctcagctggttgtggaatgaaagcactgctctttacccatccatttatttgaacactcagcagtctcctgtagctgctacactctatgtgcgcaatcgagttcgggaagccatcagagtttccaaaatacctgatgcaaaaagtccacttccggtttttgcatatacccgcatagtttttactgatcaagttttgaaattcctttctcaagatgaacttgtgtatacatttggcgaaactgttgctctgggtgcttctggaattgtaatatggggaaccctcagtataatgcgaagtatgaaatcttgcttgctcctagacaattacatggagactatactgaatccttacataatcaacgtcacactagcagccaaaatgtgtagtcaagtgctttgccaggagcaaggagtgtgtataaggaaaaactggaattcaagtgactatcttcacctcaacccagataattttgctattcaacttgagaaaggtggaaagttcacagtacgtggaaaaccgacacttgaagacctggagcaattttctgaaaaattttattgcagctgttatagcaccttgagttgtaaggagaaagctgatgtaaaagacactgatgctgttgatgtgtgtattgctgatggtgtctgtatagatgcttttctaaaacctcccatggagacagaagaacctcaaattttctactga

SEQ ID NO: 57 - protein, 17 aa, Homo sapiens
  C-terminal peptide cleaved from soluble rHuPH20 aa 431-447
DAFKLPPMETEEPQIFY

SEQ ID NO: 58 - protein, 16 aa, Homo sapiens
  C-terminal peptide cleaved from soluble rHuPH20 aa 431-446
DAFKLPPMETEEPQIF

SEQ ID NO: 59 - protein, 15 aa, Homo sapiens
  C-terminal peptide cleaved from soluble rHuPH20 aa 431-445
DAFKLPPMETEEPQI

SEQ ID NO: 60 - protein, 14 aa, Homo sapiens
  C-terminal peptide cleaved from soluble rHuPH20 aa 431-444
DAFKLPPMETEEPQ

SEQ ID NO: 61 - protein, 13 aa, Homo sapiens
  C-terminal peptide cleaved from soluble rHuPH20 aa 431-443
DAFKLPPMETEEP

SEQ ID NO: 62 - protein, 12 aa, Homo sapiens
  C-terminal peptide cleaved from soluble rHuPH20 aa 431-442
DAFKLPPMETEE

SEQ ID NO: 63 - protein, 520 aa, Ovis aries
  PH20
LDFPAPPLISNTSFLWAWNAPAERCVKIFKLPPDLRLFSVKGSPQKSATGQFITLFYADRLGYYPHIDEKTGNTVYGGIPQLGNLKNHLEKAKKDIAYYIPNDSVGLAVIDWENWRPTWARNWKPKDVYRDESVELVLQKNPQLSFPEASKIAKVDFETAGKSFMQETLKLGKLLRPNHLWGYYLFPDCYNHNYNQPTYNGNCSDLEKRRNDDLDWLWKESTALFPSVYLNIKLKSTPKAAFYVRNRVQEAIRLSKIASVESPLPVFVYHRPVFTDGSSTYLSQGDLVNSVGEIVALGASGIIMWGSLNLSLTMQSCMNLGNYNTTLNPYIINVTLAAKMCSQVLCHDEGVCTRKQWNSSDYLHLNPIMNFAIQTGKGGKYTVPGKVTLEDLQTFSDKFYCSCYANINCKKRVDIKNVHSVNVCMAEDICIEGPVKLQPSDHSSSQNEASTTTVSSISPSTTATTVVSPCTPEKQSPECLKVRCLEAIANVTQTGCQGVKWKNTSSQSQSSIQNIKNQTT

SEQ ID NO: 64 - protein, 474 aa, Bos taurus
  precursor cow PH20
MGMFRRHHISFRSFAGSSGTPQAVFTFLLLPCCLALDFRAPPLISNTSFLWAWNAPVERCVNRRFQLPPDLRLFSVKGSPQKSATGQFITLFYADRLGYYPHIDEKTGKTVFGGIPQLGNLKSHLEKAKNDIAYYIPNDSVGLAVIDWENWRPTWARNWKPKDVYRDESVELVLQKNPQLSFPEASKIAKVDFETAGKSFMQETLKLGKLLRPNHLWGYYLFPDCYNHNHNQPTYNGNCPDVEKRRNDDLEWLWKESTALFPSVYLNIRLKSTQNAALYVRNRVQEAIRLSKIASVESPLPVFVYARPVFTDGSSTYLSQGDLVNSVGEIVSLGASGIIMWGSLNLSLSVQSCMNLGTYLNTTLNPYIINVTLAAKMCSQVLCHDGGVCTRKHWNSSDYLHLNPMNFAIQTGEGGKYTVPGTLTLEDLQKFSDTFYCSCYSNLSCKKRVDIKNVHSVDVCMAEDVCIDAFLKPP

SEQ ID NO: 65 - protein, 517 aa, Ovis aries
  PH20
DFRAPPLISNTSFLWAWNAPAERCIKIFKLPPDLRLFSVKGSPQKSATGQFITLFYADRLGYYPHIDEKTGNTVYGGIPQLGNLKNHLEKAKKDIAYYIPNDSVGLAVIDWENWRPTWARNWKPKDVYRDESVELVLQKNPQLSFPEASKIAKVDFETAGKSFMQETLKLGKLLRPNHLWGYYLFPDCYNHNYNQPTYNGNCSDLEKRRNDDLDWLWKESTALFPSVYLNIKLKSTPKAAFYVRNRVQEAIRLSKIASVESPLPVFVYHRPVFTDGSSTYLSQGDLVNSVGEIVALGASGIIMWGSLNLSLTMQSCMNLGNYLNTTLNPYIINVTLAAKMCSQVLCHDEGVCTRKQWNSSDYLHLNPMNFAIQTGKGGKYTVPGKVTLEDLQTFSDKFYCSCYANINCKKRVDIKNVHSVNVCMAEDICIEGPVKLQPSDHSSSQNEASTTTVSSISPSTTATTVSPCTPEKQSPECLKVRCLEAIANVTQTGCQGVKWKNTSSQSSIQNIKNQTTY

SEQ ID NO: 66 - DNA, 1620 bp, Ovis aries
  encoding sheep PH20
ttttccgtgttggttggctctggacttcagagcaccccctctcatttcaaacacttctttcctctgggcctggaatgccccagctgaacgttgtattaaaatctttaaactacctccagatctgagactcttctctgtaaaaggaagcccccaaaaaagtgctacgggacaatttattacattattttatgctgatagacttggctactatcctcatatagatgaaaaaacaggcaacactgtatatggaggaattccccagttgggaaacttaaaaaatcatttggaaaaagccaaaaaagacattgcctattacataccaaatgacagcgtgggcttggcggtcattgactgggaaaactggaggcctacctgggcaagaaactggaaacctaaagatgtttacagggatgagtctgttgagttggttctgcaaaaaaatccacaactcagtttcccagaggcttccaagattgcaaaagtggattttgagacagcaggaaagagtttcatgcaagagactttaaaactgggaaaattacttcggccaaatcacttatggggttattatctttttcctgattgttacaatcataattataaccagcctacttacaatggaaattgctctgatttagaaaaaaggagaaatgatgatctcgactggttgtggaaggaaagcactgcccttttcccttctgtttatttgaatatcaagttaaaatctactccaaaagctgccttctatgttcgtaatcgtgtccaggaagccattcggttgtctaaaatagcgagtgttgaaagtccacttcccgtttttgtatatcaccgtccagtttttactgatgggtcttcaacatacctttctcagggtgaccttgtgaattcggttggtgagatcgttgctctaggtgcctctgggattataatgtggggcagtctcaatctaagcctaactatgcaatcttgcatgaacctaggcaattacttgaacactacactgaatccttacataatcaacgtcaccctagcagccaaaatgtgcagccaagtgctttgccacgatgaaggagtgtgtacaaggaaacaatggaattcaagcgactatcttcacctgaacccaatgaattttgctattcaaactgggaaaggtggaaaatacacagtacctgggaaagtcacacttgaagacctgcaaacgttttctgataaattttattgcagttgttatgccaacatcaactgtaagaagagagttgatataaaaaatgttcatagtgttaatgtatgtatggcagaagacatttgtatagagggccctgtgaagttacaacccagtgatcattcctctagccagaatgaggcatctactaccaccgtcagcagtatctcaccctctactacagccaccacagtatctccatgtactcctgagaaacagtcccctgagtgcctcaaagtcaggtgtttggaagccatcgccaacgtcacccaaacggggtgtcaaggtgttaaatggaagaacacttccagtcagtcaagtattcaaaatattaaaaatcaaacaacctattaaaatataaattcagtgcttataaaaaaaaaaaaaaaaaaaaaaaa

SEQ ID NO: 67 - protein, 793 aa, Arthrobacter sp.
  hyaluronan lyase (strain FB24)
MTREFSRRTALKGAALSGLLLAMVHGPAHAAATANATLTPADFAGLRQRWVDQITGRKVLVAGDNDFVTALAALDKKARTAIDLLERSAGRLTVFSDLSLAKDTDLVTTHTRLATMATAWATPGSEHFADAGLLAAIRAGLADANSLCYNASKEEQGNWWSWEIGTPKALADTMVLLHAELTAAERAAYCAAIDHFVPDPWQQFPPKRGKITSVGANRVDLCQAVTIRSLVDEDAEKLTHAVAGLSEVWQYVSAGNGFFTDGSFIQHSTTPYTGSYGVVLLTGLSKLFALLGGTGAEVSDPSRDILFKTVEGSFAPFMVAGAMADSVRGRSISRESNTGFDLGASTIESILLLARAVDPVTARRWRSLCLAWINQNRKAPILADAGVGRTALVKELLAMGLTETDLPGGHYLFPAMDRTMHHSQGWTLSTAMASSRIAWYECGNGENNRGYHTGSGMTYVYDGDLGQYDDAFWATANHCRLPGITVDTSSLPDKVEGEWGAATPANEWTGSTAYGDVAAVGQHLIGPGGTGLTARKSWFVSKDVIVCLGADIRTGSGSRIETVVDHRNLHAGFNAMGTAAGTVAATPGHPEVLTVDRWVHLEGFGGYVVLDAAPLQVLREQREGSWSEVNVKGSAARQTRNYATLYFDHGHEPEAASYAYLVAPGASASMTSSLSGQSFHTVLRNDEVAQAVKFKKEKTTAATFWRPGTVGDLALSGPACVVVKEVGDRLSIAVSDPTQNASTLTLRLKTKRFFRIIEGQGASLSHGADGFTVLEVDIANHAGRTKQIELSAE

SEQ ID NO: 68 - protein, 557 aa, Bdellovibrio bacteriovorus
  hyaluronan lyase
MTKFFFLLTLISATAFAQSEPDWTAGVPVPPGGRSNIYSWNDFDFQATLNKGKIHAQVYPVTVTGMLPPYEPVRRLIEEKNSNPLRKWIQSLMKGLSGFRSFEDVLKNLGLHKYPLENERGVYAVPYPNEIRPDTLMGFGLIERNGAEGFTFSCAACHSSNLFGKTVLGMTNRFPRANEFFIKAKKVMPLMDPHIFQAYTRATDAETALLVESKERLKSVALKQPIALGLDTSLAQVSLSLNRRAKDGYANYSDKAARSPRADAYLDNKPADSKPAVWWNVKYKNRWLSDGSVLSGNPIFTNLIWNEIGRGADLHELEQWLADNDHIIKELTTAVFASEAPHITDFYPAEKIDLGRAKAGEQIFKNTCAKCHGHYEKAWNLPQALVLSAAERLKTVEVRYKEKTPVVNVGTDPFRRQGMKSLEQLNDLEISKKNGIVIKAQEGYVPPPLVGIWARWPYMHNNSIPNLCVLLTPAKKRPSIYYSGEALNKDTDYDFSCGGYPIGDKTPKAWKTREHLYDTRNPGMGNMGHDEGIFIKDGKEILSAEDKYNLIQFLQTL

SEQ ID NO: 69 - protein, 813 aa, Propionibacterium acnes
  hyaluronan lyase
MFGTPSRRTFLTASALSAMALAASPTVTDAIAAPGPDSWSALCERWIDIITGRRAARTSDPRARAIIAKTDRKVAEILTDLVSGSSRQTVLISADLRKEQSPFITKTARAIESMACAWATPGSSYHKDPEILSACIEGLRDFCRLRYNPSQDEYGNWWDWEDGASRAVADVMCILHDVLPPEVMSAAAAGIDHFIPDPWFQQPASVKPTANPVQPVVSTGANRMDLTRAVMCRSIATGDEKRLRHAVDGLPDAWRVTTEGDGFRADGGFIQHSHIPYTGGYGDVLFSGLAMLFPLVSGMRFDIVESARKAFHDQVERGFIPVMYNGQILDDVRGRSISRINESAAMHGISIARAMLMMADALPTHRAEQWRGIVHGWMARNTFDHLSEPSTLVDISLFDAAAKARPVPESSTPSYFASMDRLVHRTADWLITVSNCSDRIAWYEYGNGENEWASRTSQGMRYLLLPGDMGQYEDGYWATVDYSAPTGTTVDSTPLKRAVGASWAAKTPTNEWSGGLASGSWSAAASHITSQDSALKARRLWVGLKDAMVELTTDVTTDASRAITVVEHRKVASSSTKLLVDGNRVSSATSFQNPRWAHLDGVGGYVFATDTDLSADVATRKGTWIDVNPSRKVKGADEVIERAYASLHVTHHDRPVAWALLPTASRSHTMALATRPGVEPFTVLRNDATVQAVRSAGALLTKDPTVVTTLAFWKPATCGGVAVNRPALVQTRESANQMEVVIVEPTQKRGSLTVTIEGSWKVKTADSHVDVSCENAAGTLHVDTAGLGGQSVRVTLARQVTQTPSGGGRHDRA

SEQ ID NO: 70 - protein, 1072 aa, Streptococcus agalactiae
  hyaluronan lyase
MEIKKKYRIMLYSALILGTILVNNSYQAKAEELTKTTSTSQIRDTQTNNIEVLQTESTTVKETSTTTTQQDLSNPTASTATATATHSTMKQVVDNQTQNKELVKNGDFNQTNPVSGSWSHTSAREWSAWIDKENTADKSPIIQRTEQGQVSLSSDKGFRGAVTQKVNIDPTKKYEVKFDIETSNKAGQAFLRIMEKKDNNTRLWLSEMTSGTTNKHTLTKIYNPKLNVSEVTLELYYEKGTGSATFDNISMKAKGPKDSEHPQPVTTQIEESVNTALNKNYVFNKADYQYTLTNPSLGKIVGGILYPNATGSTTVKISDKSGKIIKEVPLSVTASTEDKFTKLLDKWNDVTIGNHVYDTNDSNMQKINQKLDETNAKNIKTIKLDSNHTFLWKDLDNLNNSAQLTATYRRLEDLAKQITNPHSTIYKNEKAIRTVKESLAWLHQNFYNVNKDIEGSANWWDFEIGVPRSITATLALMNNYFTDAEIKTYTDPIEHFVPDAGYFRKTLDNPFKALGGNLVDMGRVKIIEGLLRKDNTIIEKTSHSLKNLFTTATKAEGFYADGSYIDHTNVAYTGAYGNVLIDGLTQLLPIIQETDYKISNQELDMVYKWINQSFLPLIVKGELMDMSRGRSISREAASSHAAAVEVLRGFLRLANMSNEERNLDLKSTIKTIITSNKFYNVFNNLKSYSDIANMNKMLNDSTVATKPLKSNLSTFNSMDRLAYYNAEKDFGFALSLHSKRTLNYEGMNDENTRGWYTGDGMFYLYNSDQSHYSNHFWPTVNPYKMAGTTEKDAKREDTTKEFMSKHSKDAKEKTGQVTGTSDFVGSVKLNDHFALAAMDFTNWDRTLTAQKGWVILNDKIVFLGSNIKNTNGIGNVSTTIDQRKDDSKTPYTTYVNGKTIDLKQASSQQFTDTKSVFLESKEPGRNIGYIFFKNSTIDIERKEQTGTWNSINRTSKNTSIVSNPFITISQKHDNKGDSYGYMMVPNIDRTSFDKLANSKEVELLENSSKQQVIYDKNSQTWAVIKHDNQESLINNQFKMNKAGLYLVQKVGNDYQNVYYQPQTMTKTDQLAI

SEQ ID NO: 71 - protein, 1072 aa, Streptococcus agalactiae 18RS21
  hyaluronan lyase
MEIKKKHRIMLYSALILGTILVNNSYQAKAEELTKTTSTSQIRDTQTNNIEVLQTESTTVKETSTTTTQQDLSNPTASTATATATHSTMKQVVDNQTQNKELVKNGDFNQTNPVSGSWSHTSAREWSAWIDKENTADKSPIIQRTEQGQVSLSSDKGFRGAVTQKVNIDPTKKYEVKFDIETSNKAGQAFLRIMEKKDNNTRLWLSEMTSGTTNKHTLTKIYNPKLNVSEVTLELYYEKGTGSATFDNISMKAKGPKDSEHPQPVTTQIEESVNTALNKNYVFNKADYQYTLTNPSLGKIVGGILYPNATGSTTVKISDKSGKIIKEVPLSVTASTEDKFTKLLDKWNDVTIGNHVYDTNDSNMQKINQKLDETNAKNIKTIKLDSNHTFLWKDLDNLNNSAQLTATYRRLEDLAKQITNPHSTIYKNEKAIRTVKESLAWLHQNFYNVNKDIEGSANWWDFEIGVPRSITATLALMNNYFTDAEIKTYTDPIEHFVPDAGYFRKTLDNPFKALGGNLVDMGRVKIIEGLLRKDNTIIEKTSHSLKNLFTTATKAEGFYADGSYIDHTNVAYTGAYGNVLIDGLTQLLPIIQETDYKISNQELDMVYKWINQSFLPLIVKGELMDMSRGRSISREAASSHAAAVEVLRGFLRLANMSNEERNLDLISTIKTIITSNKFYNVFNNLKSYSDIANMNKMLNDSTVATKPLKSNLSTFNSMDRLAYYNAEKDFGFALSLHSKRTLNYEGMNDENTRGWYTGDGMFYLYNSDQSHYSNHFWPTVNPYKMAGTTEKDAKREDTTKEFMSKHSKDAKEKTGQVTGTSDFVGSVKLNDHFALAAMDFTNWDRTLTAQKGWVILNDKIVFLGSNIKNTNGIGNVSTTIDQRKDDSKTPYTTYVNGKTIDLKQASSQQFTDTKSVFLESKEPGRNIGYIFFKNSTIDIERKEQTGTWNSINRTSKNTSIVSNPFITISQKHDNKGDSYGYMMVPNIDRTSFDKLANSKEVELLENSSKQQVIYDKNSQTWAVIKHDNQESLINNQFKMNKAGLYLVQKVGNDYQNVYYQPQTMTKTDQLAI

SEQ ID NO: 72 - protein, 1081 aa, Streptococcus agalactiae serotype Ia
  hyaluronan lyase
MEIKKKHRIMLYSALILGTILVNNSYQAKAEEFTKTTSTSQIRDTQTNNVEVPQTESTTVKGTSTTTTQQDLSNSTASTATATATHSTMKQVVDNQTQNKELVKNGDFKEKIIDKKIDKKSQWTNLYGAKDWNTYIDQTKSVNKSPIIQRTEQGQVSLSSDKGFRGAVTQKVNIDPTKKYEVKFDIETSNKVGQAFLRIMKKKDKNTRLWLSEMTSGTTNKHTLTKIYNPKLNVSEVTLELYYEKGTGSVTFDNISMKAKGPKDSEHPQPVTTQIEESVNTALNKNYVFNKADYQYTLTNPSLGKIVGGILYPSATGSTTVKISDKSGKIIKEVPLSVTASTEDNFTKLLDKWNDVTIGNHVYDTNDSNMQKLNQKLDETNAKNIKDIKLDSNRTFLWEDLKGLNNSAQLTATYRRLEDLAKQITNPHSTIYKNEKAIRTVKESLAWLHQNFYNVNKDIEGSANWWDFEIGVPRSITATLALMNNYFTDAEIKTYTDPIEHFVPDAGYFRKTLVNPFKALGGNLVDMGRVKIIEGLLRKDNTIIKKTSHSLKNLFTTATKAEGFYADGSYIDHTNVAYTGAYGNVLIDGLTQLLPIIQETDYKISNQELDMVYKWINQSFLPLIVKGELMDMSRGRSISREAASSHAAAVEVLRGFLRLANMSNEERNLDLKSTIKTIITSNKFYNVFNNLKSYSDIANMNKLLNDSTVATKPLKSNLSTFNSMDRLAYYNAEKDFGFALSLHSKRTLNYEGMNDENTRGWYTGDGMFYLYNSDQSHYSNHFWPTVNPYKMAGTTEKDTGREDTIKKLMNRYDKTNKNSKVMTGQVTGTSDFVGSVKLNDHFALAAMDFTNWDRTLTAQKGWVILNDKIVFLGSNIKNTNGVGNVSTTIDQRKDDSKTPYTTYVNGKTVDLKQASSQQFTDTKSVFLESKEPGRNIGYIFFKNSTIDIERKEQTGTWNSINRTSKNTSIVSNPFITISQKHDNKGDSYGYMMVPNIDRTSFDKLANSKEVELLENSSKQQVIYDKNSQTWAVIKHDNQESLINNQFKMNKAGLYLVQKVGNDYQNVYYQPQTMTKTDQLAI

SEQ ID NO: 73 - protein, 984 aa, Streptococcus agalactiae serotype III
  hyaluronan lyase
MKQVVDNQTQNKELVKNGDFNQTNPVSGSWSHTSAREWSAWIDKENTADKSPIIQRTEQGQVSLSSDKGFRGAVTQKVNIDPTKKYEVKFDIETSNKAGQAFLRIMEKKDNNTRLWLSEMTSGTTNKHTLTKIYNPKLNVSEVTLELYYEKGTGSATFDNISMKAKGPKDSEHPQPVTTQIEESVNTALNKNYVFNKADYQYTLTNPSLGKIVGGILYPNATGSTTVKISDKSGKIIKEVPLSVTASTEDKFTKLLDKWNDVTIGNHVYDTNDSNMQKINQKLDETNAKNIKTIKLDSNHTFLWKDLDNLNNSAQLTATYRRLEDLAKQITNPHSTIYKNEKAIRTVKESLAWLHQNFYNVNKDIEGSANWWDFEIGVPRSITATLALMNNYFTDAEIKTYTDPIEHFVPDAGYFRKTLDNPFKALGGNLVDMGRVKIIEGLLRKDNTIIEKTSHSLKNLFTTATKAEGFYADGSYIDHTNVAYTGAYGNVLIDGLTQLLPIIQETDYKISNQELDMVYKWINQSFLPLIVKGELMDMSRGRSISREAASSHAAAVEVLRGFLRLANMSNEERNLDLKSTIKTIITSNKFYNVFNNLKSYSDIANMNKMLNDSTVATKPLKSNLSTFNSMDRLAYYNAEKDFGFALSLHSKRTLNYEGMNDENTRDWYTGDGMFYLYNSDQSHYSNHFWPTVNPYKMAGTTEKDAKREDTTKEFMSKHSKDAKEKTGQVTGTSDFVGSVKLNDHFALAAMDFTNWDRTLTAQKGWVILNDKIVFLGSNIKNTNGIGNVSTTIDQRKDDSKTPYTTYVNGKTIDLKQASSQQFTDTKSVFLESKEPGRNIGYIFFKNSTIDIERKEQTGTWNSINRTSKNTSIVSNPFITISQKHDNKGDSYGYMMVPNIDRTSFDKLANSKEVELLENSSKQQVIYDKNSQTWAVIKHDNQESLINNQFKMNKAGLYLVQKVGNDYQNVYYQPQTMTKTDQLAI

SEQ ID NO: 74 - protein, 807 aa, Staphylococcus aureus (strain COL); identical to SEQ ID NO: 33
  hyaluronan lyase

SEQ ID NO: 75 - protein, 420 aa, Staphylococcus aureus (strain MRSA252)
  hyaluronan lyase
MTYRMKKWQKLSTITLLMAGVITLNGGEFRSIDKHQIAVADTNVQTTDYEKLRNIWLDVNYGYDKYDENNPDMKKKFEATENEAEKLLKEMKTESDRKYLWESSKDLDTKSADMTRTYRNIEKISEAMKHKNTKLKTDENKTKVKDALEWLHKNAYGKEPDKKVADLTSNFKNKTSRNTNLNWWDYEIGTPRALTNTLILLQEDFTDEEKKKYTAPIKTFAPDSDKILSSVGKSEPAKGGNLVDISKVKLLESIIEEDKDMMKKSIDSFNTVFTYAQNSATGKERNGFYKDGSYIDHQDVPYTGAYGVVLLEGISQMMPMIKETPFNDSNQNDTTLKSWIDDGFMPLIYKGEMMDLSRGRAISRENETSHSASATVMKSLLRLSDTMDKSTKAKYKKIVKTSVESDSSYKQTDYLSSYSD

SEQ ID NO: 76 - protein, 806 aa, Staphylococcus aureus (strain MRSA252)
  hyaluronan lyase
MTNKMKKWQKLSTITLLMTGVIALNNGEFRNVDKHQIAVADTNVQTPDYEKLKKTWLDVNYGYDQYDENNQDMKKKFDAKEKEAKKLLDDMKTDTNRTYLWSGAENLETNSSHMTKTYRNIEKIAESMQHKNTVLKTVENKLKIKEALDWMHKNVYGKNPSQKVEDLTKNRKGQTTPKNNSLNWWDYEIGTPRALTNTLLLMDDMLTKDEMKNYSKPISTYAPSSDKILSSVGESEDAKGGNLVDISKVKLLESVIEEDVDMLKKSIDSFNKVFTYVQDSATGKGRNGFYKDGSYIDHQDVPYTGAYGVVLLEGISQMMPMIKESPFKTTQDNATLSNWIDEGFMPLIYKGEMMDLSRGRAISRENETSHTASATVMKSLLRLNDTMDDSTKTRYKQIVKTSVNSDSSYNQNNYLNSYSDIAKMKKLMNDSTISKNDLTQQLKIYNDMDRVTYHNKDLDFAFGLSMTSKNIARYENINGENLKGWHTGAGMSYLYNSDVKHYRDNFWATADMTCLPGTTTLNDMPSTNTKNDKSFVGGTKLNNKYASIGMDFENQDKTLTAKKSYFILNDKIVFLGTGIKSTDSSKNPVTSVENRKANGYKLFKDDIEITTSDVNAQETHSVFLESNDTKKNIGYHFLDKPKITVKKESHTGKWSEINKSQKKDDKKDEYYEVTQTHNTSDSKYAYVLYPGLSKSDFKSKNNNVSIVKQDEDFHVIKDNDGVFAGVNYSDNTKSFDINGITVELKEKGMFVIKKKDDKAYKCSFYNPETTNTASNIESKIFIKGYTITNKSVINSNDAGVNFELTK

SEQ ID NO: 77 - protein, 815 aa, Staphylococcus aureus (strain MSSA476)
  hyaluronan lyase
MTYRIKKWQKLSTITLLMAGVITLNGGEFRSIDKYQIAVADTNVQTPDYEKLRNTWLDVNYGYDKYDEKNDAMKKKFEATENEAKKLLSEMKTESDRKYLWENSKDLDTKSADMTRTYRNIEKIAEAMKHKDTKLKIDENKKKVKDALEWLHKNAYGKEPDKKVADLTSNFKNKTSRNTNLNWWDYEIGTPRALTNTLILLNDQFSNDEKKKYTAPIKTFAPESDKILSSVGQPEQAKGGNLVDIAKVKLLESIIEEDKDITKNSIDAFNKVFTYVQSNATGKERNGFYKDGSYIDHQDVPYTGAYGVVLLEGISQMMPMIKETPFNDKTQNDTTLKSWIDDGFMPLIYKGEMMDLSRGRAISRENETSHTASATVMKSLLRLSDAMDDSTKAKYKQIVKTSVKSDSSYGQNDTLSSYSDISKMKSLMEDSTISTNGLTQQLKIYNDMDRVTYHNKDLDFAFGLSMTSKNVARYESINGENLKGWHTGAGMSYLYNSDVKHYRDNFWATADMKRLAGTTTLENEEPKGTDVKKSSKTFVGGTKFDDQHASIGMDFENQDKTLTAKKSYFILNDKIVFLGTGIKSTDSSKNPVTTIENRKANGYTLYTDDKQTTASDNQGTNSVFLESTNKPKNNIGYHFLNESKITVKKESHTGKWSDINKSQKQDSKTNQYYEVTQKHSNTDSKYAYVLYPGLSKDDFNTKKDKVTVVKQDDDFHVVKDNESVWAGVNYSDSTQTFIINNTKVEVKAKGMFILKKKDDKTYECSFYNPESTNTASDIESKISMTGYSITNKNTSTSNESGVRFELQQTLNKDDN

SEQ ID NO: 78 - protein, 807 aa, Staphylococcus aureus (strain NCTC 8325); identical to SEQ ID NO: 33
  hyaluronan lyase

SEQ ID NO: 79 - protein, 809 aa, Staphylococcus aureus (strain bovine RF122)
  hyaluronan lyase
MTYRMKKWQKLSTITLLMAGGITFNDSEFRSVDKHQIAVADTNVQTPNYEKLKNTWLDVNYGYDKYDESNPDMKKKFEATEKEARKLLSEMKTESDRKYLWENSKDLDTKSADMTRTYRNIEKIAEAMKHPKTTLKNDENKKKVKDALEWLHKNAYGKEPGKKVADLKTNFSKSAPQKNTNLNWWDYEIGTPRALTNTLILLKEDFTDEEKKKYTAPIKTFAPKSDEILSSVGKAEPAKGGNLVDISKVKLLESIIEEDKDMMKNSIDSFNKVFTYVQDSATDKERNGFYKDGSYIDHKDVPYTGAYGVVLLEGISQMMPMIKETPFNDKTQNNTTLTSWIDDGFMPLIYKGEMMDLSRGRAISRENETSHSASATVMKSLLRLSDAMDESTKAKYKQIVKNSVKSDSSYGQNDTLSSYSDIDKMKSLMTDSTISTNGLTQQLKIYNAMDRVTYHNKDLDFAFGLSMTSKNVARYENINGENLKGWHTGAGMSYLYNSDVRHYRDNFWATADMKRLADTTTLENEEPKGTDVKKSSKTFVGGTKFDDQHASIGMDFENQDKTLTAKKSYFILNDKIVFLGTGIKTTDSSKNPVTTIENRKAHGYTLYTDDKQTTNSNNQETNSVFLESTNSTQNNIGYHFLNKSKITVKKESHTGKWSDINKSQKDTQKTDEYYEVTQKHSNTDDKYAYVLYPGITKDNFKSKASQVTVVKQDDDFHVVKDNESVWAGVNYSDSTQTFDINGTKVEVKAKGMFILKKKDDNTYECSFYNPESTNSASDIESKISMTGYSITNKNTSNTNESGVRFELTK

SEQ ID NO: 80 - protein, 807 aa, Staphylococcus aureus (strain bovine RF122)
  hyaluronan lyase
MTYKMKKWQKLSTITLLMAGVITLNNGEFRNVDKHQIAVADTNVQTPDYEKLKKTWLDVNYGNDQYDENNQDMKKKFDAKENEAKKLLEDMKTDTNRTYLWSGAENLETNSSHMTKTYRNIEKIAEAMRHKNTSLKTDENKLKIKDAIKWLHHNVYGKDPDKKVADLTTNRKEKDSSKKNNSLNWWDYEIGTPRALTNTLLLMDNMLTKDEMKNYSKPISIYSPSSYKILSSVGESEDAKGGNLVDIAKVKFLESVIEEDVDMMKKSIDSFNKVFTYVQDSATGKARNGFYKDGSYIDHQDVPYTGAYGVVLLEGISQMMPMIKESPFKHTQDKATLSNWIDEGFMPLIYKGEMMDLSRGRAISRENETSHTASATVMKSLLRLSDTMDESTKTKYKQIVKTSVKSDSSYDSNDTLNSYSDIDKMKKLMNDSTISKNDLTQQLKIYNDMDRVTYHNKELDFAFGLSMTSKNIARYENINGENLKGWHTGAGMSYLYNSDVKHYRDNFWATADMTRLPGTTTLNDMPSTNTKNDKSFVGGTKLNNKYASIGMDFENQDKTLTAKKSYFILNDKIVFIGTGIKSTDSSKNPVTSVENRKANGYKLFKGDIEITTSDVNAQETHSVFLESNDTKKNIGYHFLDKPKITVKKESHTGKWSEINKSQKTDDKKDEYYEVTQTHNTSDSKYAYVLYPGLSKSDFKSKNNNVSIVKQDEDFHVIKDNDGVFAGVNYSDSTKSFDINGTIVELKEKGMFVIKKKDDNTYECSFYNPTSTNSTSNKESKISVTGYTITNQSVSNFKESDIHFELTK

SEQ ID NO: 81 - protein, 807 aa, Staphylococcus aureus (strain USA300); identical to SEQ ID NO: 33
  hyaluronan lyase

SEQ ID NO: 82 - protein, 1066 aa, Streptococcus pneumoniae
  hyaluronan lyase
MQTKTKKLIVSLSSLVLSGFLLNHYMTIGAEETTTNTIQQSQKEVQYQQRDTKNLVENGDFGQTEDGSSPWTGSKAQGWSAWVDQKNSADASTRVIEAKDGAITISSHEKLRAALHRMVPIEAKKKYKLRFKIKTDNKIGIAKVRIIEESGKDKRLWNSATTSGTKDWQTIEADYSPTLDVDKIKLELFYETGTGTVSFKDIELVEVADQLSEDSQTDKQLEEKIDLPIGKKHVFSLADYTYKVENPDVASVKNGILEPLKEGTTNVIVSKDGKEVKKIPLKILASVKDAYTDRLDDWNGIIAGNQYYDSKNEQMAKLNQELEGKVADSLSSISSQADRTYLWEKFSNYKTSANLTATYRKLEEMAKQVTNPSSRYYQDETVVRTVRDSMEWMHKHVYNSEKSIVGNWWDYEIGTPRAINNTLSLMKEYFSDEEIKKYTDVIEKFVPDPEHFRKTTDNPFKALGGNLVDMGRVKVIAGLLRKDDQEISSTIRSIEQVFKLVDQGEGFYQDGSYIDHTNVAYTGAYGNVLIDGLSQLLPVIQKTKNPIDKDKMQTMYHWIDKSFAPLLVNGELMDMSRGRSISRANSEGHVAAVEVLRGIHRIADMSEGETKQCLQSLVKTIVQSDSYYDVFKNLKTYKDISLMQSLLSDAGVASVPRPSYLSAFNKMDKTAMYNAEKGFGFGLSLFSSRTLNYEHMNKENKRGWYTSDGMFYLYNGDLSHYSDGYWPTVNPYKMPGTTETDAKRADSDTGKVLPSAFVGTSKLDDANATATMDFTNWNQTLTAHKSWFMLKDKIAFLGSNIQNTSTDTAATTIDQRKLESGNPYKVYVNDKEASLTEQEKDYPETQSVFLESFDSKKNIGYFFFKKSSISMSKALQKGAWKDINEGQSDKEVENEFLTISQAHKQNRDSYGYMLIPNVDRATFNQMIKELESSLIENNETLQSVYDAKQGVWGIVKYDDSVSTISNQFQVLKRGVYTIRKEGDEYKIAYYNPETQESAPDQEVFKKLEQAAQPQVQNSKEKEKSEEEKNHSDQKNLPQTGEGQSILASLGFLLLGAFYLFRRGKNN

SEQ ID NO: 83 - protein, 1078 aa, Streptococcus pneumoniae (strain ATCC BAA-255/R6)
  hyaluronan lyase
MILQYVYWSVYMQTKTKKLIVSLSSLVLSGFLLNHYMTVGAEETTTNTIQQSQKEVQYQQRDTKNLVENGDFGQTEDGSSPWTGSKAQGWSAWVDQKNSSADASTRVIEAKDGAITISSPEKLRAAVHRMVPIEAKKKYKLRFKIKTDNKVGIAKVRIIEESGKDKRLWNSATTSGTKDWQTIEADYSPTLDVDKIKLELFYETGTGTVSFKDIELVEVADQPSEDSQTDKQLEEKIDLPIGKKHVFSLADYTYKVENPDVASVKNGILEPLKEGTTNVIVSKDGKEVKKIPLKILASVKDTYTDRLDDWNGIIAGNQYYDSKNEQMAKLNQELEGKVADSLSSISSQADRIYLWEKFSNYKTSANLTATYRKLEEMAKQVTNPSSRYYQDETVVRTVRDSMEWMHKHVYNSEKSIVGNWWDYEIGTPRAINNTLSLMKEYFSDEEIKKYTDVIEKFVPDPEHFRKTTDNPFKALGGNLVDMGRVKVIAGLLRKDDQEISSTIRSIEQVFKLVDQGEGFYQDGSYIDHTNVAYTGAYGNVLIDGLSQLLPVIQKTKNPIDKDKMQTMYHWIDKSFAPLLVNGELMDMSRGRSISRANSEGHVAAVEVLRGIHRIADMSEGETKQRLQSLVKTIVQSDSYYDVFKNLKTYKDISLMQSLLSDAGVASVPRTSYLSAFNKMDKTAMYNAEKGFGFGLSLFSSRTLNYEHMNKENKRGWYTSDGMFYLYNGDLSHYSDGYWPTVNPYKMPGTTETDAKRADSDTGKVLPSAFVGTSKLDDANATATMDFTNWNQTLTAHKSWFMLKDKIAFLGSNIQNTSTDTAATTIDQRKLESSNPYKVYVNDKEASLTEQEKDYPETQSVFLESSDSKKNIGYFFFKKSSISMSKALQKGAWKDINEGQSDKEVENEFLTISQAHKQNGDSYGYMLIPNVDRATFNQMIKELESSLIENNETLQSVYDAKQGVWGIVKYDDSVSTISNQFQVLKRGVYTIRKEGDEYKIAYYNPETQESAPDQEVFKKLEQAAQPQVQNSKEKEKSEEEKNHSDQKNLPQTGEGQSILASLGFLLLGAFYLFRRGKNN

SEQ ID NO: 84 - protein, 1067 aa, Streptococcus pneumoniae serotype 2 (strain D39/N)
  hyaluronan lyase
MQTKTKKLIVSLSSLVLSGFLLNHYMTVGAEETTTNTIQQSQKEVQYQQRDTKNLVENGDFGQTEDGSSPWTGSKAQGWSAWVDQKNSSADASTRVIEAKDGAITISSPEKLRAAVHRMVPIEAKKKYKLRFKIKTDNKVGIAKVRIIEESGKDKRLWNSATTSGTKDWQTIEADYSPTLDVDKIKLELFYETGTGTVSFKDIELVEVADQPSEDSQTDKQLEEKIDLPIGKKHVFSLADYTYKVENPDVASVKNGILEPLKEGTTNVIVSKDGKEVKKIPLKILASVKDTYTDRLDDWNGIIAGNQYYDSKNEQMAKLNQELEGKVADSLSSISSQADRIYLWEKFSNYKTSANLTATYRKLEEMAKQVTNPSSRYYQDETVVRTVRDSMEWMHKHVYNSEKSIVGNWWDYEIGTPRAINNTLSLMKEYFSDEEIKKYTDVIEKFVPDPEHFRKTTDNPFKALGGNLVDMGRVKVIAGLLRKDDQEISSTIRSIEQVFKLVDQGEGFYQDGSYIDHTNVAYTGAYGNVLIDGLSQLLPVIQKTKNPIDKDKMQTMYHWIDKSFAPLLVNGELMDMSRGRSISRANSEGHVAAVEVLRGIHRIADMSEGETKQRLQSLVKTIVQSDSYYDVFKNLKTYKDISLMQSLLSDAGVASVPRTSYLSAFNKMDKTAMYNAEKGFGFGLSLFSSRTLNYEHMNKENKRGWYTSDGMFYLYNGDLSHYSDGYWPTVNPYKMPGTTETDAKRADSDTGKVLPSAFVGTSKLDDANATATMDFTNWNQTLTAHKSWFMLKDKIAFLGSNIQNTSTDTAATTIDQRKLESSNPYKVYVNDKEASLTEQEKDYPETQSVFLESSDSKKNIGYFFFKKSSISMSKALQKGAWKDINEGQSDKEVENEFLTISQAHKQNGDSYGYMLIPNVDRATFNQMIKELESSLIENNETLQSVYDAKQGVWGIVKYDDSVSTISNQFQVLKRGVYTIRKEGDEYKIAYYNPETQESAPDQEVFKKLEQAAQPQVQNSKEKEKSEEEKNHSDQKNLPQTGEGQSILASLGFLLLGAFYLFRRGKNN

SEQ ID NO: 85 - protein, 805 aa, Streptococcus pyogenes serotype M1
  hyaluronan lyase
MNTYFCTHHKQLLLYSNLFLSFAMMGQGTAIYADTLTSNSEPNNTYFQTQTLTTTDSEKKVVQPQQKDYYTELLDQWNSIIAGNDAYDKTNPDMVTFHNKAEKDAQNIIKSYQGPDHENRTYLWEHAKDYSASANITKTYRNIEKIAKQITNPESCYYQDSKAIAIVKDGMAFMYEHAYNLDRENHQTTGKENKENWWVYEIGTPRAINNTLSLMYPYFTQEEILKYTAPIEKFVPDPTRFRVRAANFSPFEANSGNLIDMGRVKLISGILRKDDLEISDTIKAIEKVFTLVDEGNGFYQDGSLIDHVVTNAQSPLYKKGIAYTGAYGNVLIDGLSQLIPIIQKTKSPIKADKMATIYHWINHSFFPIIVRGEMMDMTRGRSISRFNAQSHVAGIEALRAILRIADMSEEPHRLALKTRIKTLVTQGNAFYNVYDNLKTYHDIKLMKELLSDTSVPVQKLDSYVASFNSMDKLALYNNKHDFAFGLSMFSNRTQNYEAMNNENLHGWFTSDGMFYLYNNDLGHYSENYWATVNPYRLPGTTETEQKPLEGTPENIKTNYQQVGMTGLSDDAFVASKKLNNTSALAAMTFTNWNKSLTLNKGWFILGNKIIFVGSNIKNQSSHKAYTTIEQRKENQKYPYCSYVNNQPVDLNNQLVDFTNTKSIFLESDDPAQNIGYYFFKPTTLSISKALQTGKWQNIKADDKSPEAIKEVSNTFITIMQNHTQDGDRYAYMMLPNMTRQEFETYISKLDIDLLENNDKLAAVYDHDSQQMHVIHYGKKATMFSNHNLSHQGFYSFPHPVRQNQQ

SEQ ID NO: 86 - protein, 780 aa, Streptococcus pyogenes serotype M2 (strain MGAS10)
  hyaluronan lyase
MVYFYLVNQSTFIISFLYWRNVSVNTYFCTHHKQLLLYSNLFLSFAMIGQGTAIYADTLTSNSEPNNTYFQTQTLTTTDSEKKVVQPQQKDYYTELLDQWNSIIAGNDAYDKTNPDMVTFHNKAEKDAQNIIKSYQGPDHENRTYLWEHAKDYSASTNITKTYRNIEKIAKQITNPESCYYQDSKAIAIVKDGMAFMYEHAYNLNRENHQTTGKENKENWWVYEIGTPRAINNTLSLMYPYFTQEEILKYTAPIEKFVPDPTRFRVRAANFSPFEANSGNLIDMGRVKLISGILRKDDLEISDTIKAIEKVFTLVDEGNGFYQDGSLIDHVVTNTQSPLYKKGIAYTGAYGNVLIDGLSQLIPIIQKTKSPIEADKMATIYHWINHSFFPIIVRGEMMDMTRGRSISRFNAQSHVAGIEALRAILRIADMSEEPHRLELKTRIKTLVTQGNAFYNVYDNLKTYHDIKLMKELLSDTSVPVQKLDSYVASFNSMDKLALYNNKHDFAFGLSMFSNRTQNYEAMNNENLHGWFTSDGMFYLYNNDLGHYSENYWATVNPYRLPGTTETEQKPLEGTPENIKTNYQQVGMTSLSDDAFVASKKLNNTSALAAMTFTNWNKSLTLNKGWFILGNKIIFVGSNIKNQSSHKAYTTIEQRKENQKHPYCSYVNNQPVDLNNQLVDFTNTKSIFLESDDPAQNIGYYFFKPRTLSISKALQTGKWQNIKADDKSPEAIKEVSNTFITIMQNHTQEGDRYAYMMLPNMTRQEFETYISKLDIDLLENN

SEQ ID NO: 87 - protein, 868 aa, Streptococcus pyogenes serotype M4 (strain MGAS10)
  hyaluronan lyase
MNTYFCTHHKQLLLYSNLFLSFAMMGQGTAIYADTLTSNSKPNNTYFQTQTLTTTDSEKKVVQPQQKDYYTELLDQWNSIIAGNDAYDKTNPDMVTFHNKAEKDAQNIIKSYQEPDHENRTYLWEHAKDYSASANITKTYRNIEKIAKQITNPESCYYQDSKAIAIVKDGMAFMYEHAYNLDRENHQTTGKENKENWWDYEIGTPRAINNTLSLMYPYFTQEEILKYTAPIEKFVPDPTRFRVRAANFPPFEANSGNLIDMGRVKLISGILRKDDLEISDTIKAIEKVFTLVDEGNGFYQDGSLIDHVVTNAQSPLYKKGIAYTGAYGNVLIDGLSQLIPIIQKTKSPIEADKMATIYHWINHSFFPIIVRGEMMDMTRGRSISRFNAQSHVAGIEALRAILRIADMSEEPHRLALKTRIKTLVTQGNVFYNVYDNLKTYHDIKLMKELLSDTSVPVQKLDSYVASFNSMDKLALYNNKHDFAFGLSMFSNRTQNYEAMNNENLHGWFTSDGMFYLYNNDLGHYSENYWATVNPYRLPGTTETEQKPLEGTPENIKTNYQQVGMTSLSDDAFVASKKLNNTSALAAMTFTNWNKSLTLNKGWFILGNKIIFVGSNIKNQSSHKAYTTIEQRKENQKHPYCSYVNNQPVDLNNQLVDFTNTKSIFLESDDPAQNIGYYFFKPTTLSISKALQTGKWQNIKADDKSPEAIKEVSNTFITIMQNHTQDGDRYAYMMLPNMTRQEFETYISKLDIDLLENNDKLAAVYDHDSQQMHVIHYEKKATTFSNHNLSHQGFYSFPHPVKQNQQQKLAHQGIAAKNNALNSHKIPHKRQRRLPRTGYQSSSLEFLGGALVASFNHITKPFRKKDLRI

SEQ ID NO: 88 - protein, 828 aa, Streptococcus pyogenes serotype M6
  hyaluronan lyase
MVYFYLVDQFTFIISFLYWRNLSVNTYFCTHHKQLLLYSNLFLSFAMMGQGTAIYADTLTSNSEPNNTYFQTQTLTTTDSEKKVVQPQQKDYYTELLDQWNSIIAGNDAYDKTNPDMVTFHNKAEKDAQNIIKSYQGPDHENRTYLWEHAKDYSASTNITKTYRNIEKIAKQITNPESCYYQDSKAIAIVKDGMAFMYEHAYNLDRENHQTTGKENKENWWVYEIGTPRAINNTLSLMYPYFTQEEILKYTAPIEKFVPDPTRFRVRAANFSPFEANSGNLIDMGRVKLISGILRKDDLEISDTIKAIEKVFTLVDEGNGFYQDGSLIDHVVTNAQSPLYKKGIAYTGAYGNVLIDGLSQLIPIIQKTKSPIEADKMATIYHWINHSFFPIIVRGEMMDMTRGRSISRFNAQSHVAGIEALRAILRIADMSEEPHRLALKTRIKTLVTQGNAFYNVYDNLKTYHDIKLMKELLSDTFVPVQKLDSYVASFNSMDKLALYNNKHDFAFGLSMFSNRTQNYEAMNNENLHGWFTSDGMFYLYNNDLGHYSENYWATVNPYRLPGTTETEQKPLEGTPENIKTDYQQVGMTSLSDDAFVASKKLNNTSALAAMTFTNWNKSLTLNKGWFILGNKIIFVGSNIKNQSSHKAYTTIEQRKENQKHPYCSYVNNQPVDLNNQLVDFTNTKSIFLESDDPAQNIGYYFFKPTTLSISKALQTGKWQNIKADDKSPEAIKEVSNTFITIMQNHTQDGDRYAYMMLPNMTRQEFETYISKLDIDLLENNDKLAAVYDHDSQQMHVIHYEKKATMFSNHNLSHQGFYSFPHPVKQNQQ

SEQ ID NO: 89 - protein, 556 aa, Streptococcus pyogenes serotype M12 (strain MGAS2)
  hyaluronan lyase
MVYFYLVNQSTFIISFLYWRNLSVNTYFCTHHKQLLLYSNLFLSFAMMGQGTAIYADTLTSNSEPNNTYFQTQTLTTTDSEKKVVQPQQKDYYTELLDQWNSIIAGNDAYDKTNPDMVTFHNKAEKDAQNIIKSYQGPDHENRTYLGNMQRIIPLLLISRKLTAILKKISKMKSLMEDSTISTNGLTQQLKIYNDMDRVTYHNKGLDFAFGLSMTSKNVARYESINGENLKGWHTGAGMSYLYNSDVKHYRDNFWATADMKRLAGTTTLDNEEPKSTDVKKSSKTFVGGTKFDDQHASIGMDFENQDKTLTAKKSYFILNDKIVFLGTGIKSTDSSKNPVTTIENRKANDYKLYKDDTQTTNSDNQETNSLFLESTNSTQNNIGYHFLNESKITVKKESHTGKWSDINKSQKDIQKTDEYYEVTQKHSNTDSKYAYVLYPGLSKDVFKSKASKVTVVKQEDDFHVVKDNESVWAGINYSDSAKTFEINNTKVEVKAKGMFILTKKDDNTYECSFYNPESTNSVSDIESKISMTGYSIINKNTSTSNESGVRFELTK

SEQ ID NO: 90 - protein, 635 aa, Streptococcus pyogenes serotype M12 (strain MGAS2)
  hyaluronan lyase
MAFMYEHAYNLNRENHQTTGKENKENWWVYEIGTPRAINNTLSLMYPYFTQEEILKYTAPIEKFVPDPTRFRVRAANFSPFEASSGNLIDMGRVKLISGILRKDDLEISDTIKAIEKVFTLVDEGNGFYQDGSLIDHVVTNAQSPLYKKGIAYTGAYGNVLIDGLSQLIPIIQKTKSPIEADKMATIYHWINHSFFPIIVRGEMMDMTRGRSISRFNAQSHVAGIEALRAILRIADMSEEPHRLALKTRIKTLVTQGNAFYNVYDNLKTYHDIKLMKELLSDTSVPVQKLDSYVASFNSMDKLALYNNKHDFAFGLSMFSNRTQNYEAMNNENLHGWFTSDGMFYLYNNDLGHYSENYWATVNPYRLPGTTETEQKPLEGTPENIKTNYQQVGMTSLSDDAFVASKKLNNTSALAAMTFTNWNKSLTLNKGWFILGNKIIFVGSNIKNQSSHKAYTTIEQRKENQKHPYCSYVNNQPVDLNNQLVDFTNTKSIFLESDDPAQNIGYYFFKPTTLSISKALQTGKWQNIKADDKSPEAIKEVSNTFITIMQNHTQDGDRYAYMMLPNMTRQEFETYISKLDIDLLENNDKLAAVYDHDSQQMHVIHYEKKATMFSNHNLSHQGFYSFPHPVKQNQQ

SEQ ID NO: 91 - protein, 828 aa, Streptococcus pyogenes serotype M12 (strain MGAS9)
  hyaluronan lyase
MVYFYLVNQSTFIISFLYWRNLSVNTYFCTHHKQLLLYSNLFLSFAMMGQGTAIYADTLTSNSEPNNTYFQTQTLTTTDSEKKVVQPQQKDYYTELLDQWNSIIAGNDAYVKTNPDMVTFHNKAEKDAQNIIKSYQGPDHENRTYLWEHAKDYSASTNITKTYRNIEKIAKQITNPESCYYQDSKAIAIVKDGMAFMYEHAYNLNRENHQTTGKENKENWWVYEIGTPRAINNTLSLMYPYFTQEEILKYTAPIEKFVPDPTRFRVRAANFSPFEASSGNLIDMGRVKLISGILRKDDLEISDTIKAIEKVFTLVDEGNGFYQDGSLIDHVVTNAQSPLYKKGIAYTGAYGNVLIDGLSQLIPIIQKTKSPIEADKMATIYHWINHSFFPIIVRGEMMDMTRGRSISRFNAQSHVAGIEALRAILRIADMSEEPHRLALKTRIKTLVTQGNAFYNVYDNLKTYHDIKLMKELLSDTSVPVQKLDSYVASFNSMDKLALYNNKHDFAFGLSMFSNRTQNYEAMNNENLHGWFTSDGMFYLYNNDLGHYSENYWATVNPYRLPGTTETEQKPLEGTPENIKTNYQQVGMTSLSDDAFVASKKLNNTSALAAMTFTNWNKSLTLNKGWFILGNKIIFVGSNIKNQSSHKAYTTIEQRKENQKHPYCSYVNNQPVDLNNQLVDFTNTKSIFLESDDPAQNIGYYFFKPTTLSISKALQTGKWQNIKADDKSPEAIKEVSNTFITIMQNHTQDGDRYAYMMLPNMTRQEFETYISKLDIDLLENNDKLAAVYDHDSQQMHVIHYEKKATMFSNHNLSHQGFYSFPHPVKQNQQ

SEQ ID NO: 92 - protein, 828 aa, Streptococcus pyogenes serotype M28
  hyaluronan lyase
MVYFYLVNQFTFIISFLYRRNLSVNTYFCTHHKQLLLYSNLFLSFAMMGQGTAIYADTLTSNSEPNNTYFQTQMLTTTDSEKKVVQPQQKDYYTELLDQWNSIIAGNDAYDKTNPDMVTFHNKAEKDAQNIIKSYQGPDHENRTYLWEHAKDYSASANITKTYRNIEKIAKQITNPESCYYQDSKAIAIVKDGMAFMYEHAYNLDRENHQTTGKENKENWWVYEIGTPRAINNTLSLMYPYFTQEEILKYTAPIEKFVPDPTRFRVRAANFSPFEANSGNLIDMGRVKLISGILRKDDLEISDTIKAIEKVFTLVDEGNGFYQDGSLIDHVVTNAQSPLYKKGIAYTGAYGNVLIDGLSQLIPIIQKTKSSIEADKMATIYHWINHSFFPIIVRGEMMDMTRGRSISRFNAQSHVAGIEALRAILRIADMSEEPHRLALKTRIKTLVTQGNAFYNVYDNLKTYHDIKLMKELLSDTSVPVQKLDSYVASFNSMDKLALYNNKHDFAFGLSMFSNRTQNYEAMNNENLHGWFTSDGMFYLYNNDLGHYSENYWATVNPYRLPGTTETEQKPLEGTPENIKTNYQQVGMTSLSDDAFVASKKLNNTSALAAMTFTNWNKSLTLNKGWFILGNKIIFVGSNIKNQSSHKAYTTIEQRKENQKHPYHAYVNNQPVDLNNQLVDFTNTKSIFLESDDSAQNIGYYFFKPTTLSISKALQTGKWQNIKADDKSPEAIKEVSNTFITIMQNHTQDGDRYAYMMLPNMTRQEFETYISKLDIDLLENNDKLAAVYDHDSQQMHVIHYEKKATMFSNHNLSHQGFYSFPHPVKQNQQ

SEQ ID NO: 93 - protein, 522 aa, Streptococcus suis
  hyaluronan lyase
MGFFISQSKQHYGIRKYKVGVCSALIALSILGTRVAANQLPSTETASPQSSQLVETTPETTEAVNLTTEAVMTSEVSSEVSPVTSTETQPSSTAAETLASPQAVQATKEEEKNLVANGEFASTTAASGNWADPAATNWETWIPANVKKENGQVRIDEGRLHISSTASYRVAVHQTVDVDPNKRYLFSYNVETKDLKGSGVRVRLRSLTAEGKDLSPQEFAYTPYKNGSQAEHIEQILTVSPETRKLKVELFFENSVGQAWLDNISLVEYVEKTPETPEPSLELVQPETGQISLASNKVYLPVRPDLTYRIADAAVAIVEKNMIRPLAAGKTQVDVYDKDTKLSSFELTVTEHQATVFDTLRNNWEDISLANKRYQSNDTQMKAFLGRLDAGVASSLKKWVEPTNQGKTIFNDIDFSKSSHLTTVYRRLEQMAQVVENPDSAYYHDRSLIDLVRKGMNWLYTNVYNENKSIDGNWWDYEIGTPRAVVNTLIYMHPYFSQEEILTYTKPISKFVPDPTTISVKH

SEQ ID NO: 94 - protein, 1164 aa, Streptococcus suis
  hyaluronan lyase
MGFFISQSKQHYGIRKYKVGVCSALIALSILGTRVAANQLPSTETASPQSSQLVETTPETTEAVMTSEVSSEVSPVTSTETQPSSTTAETLASPQAVQATKEEKNLVANGEFISTTAPSGNWKELAATNWETWIPANVKKENGQVRIDEGRLHISSTASYRVAVHQTVDVDPNKRYLFSYDVETKDLKGSGVRVRLRSLTAEGKDLSPQEFAYTPYKNGSQAEHIEQILTVSPETRKLKVELFFENSVGQAWLDNISLVEYVEKTPETPEQSPELVQPETGQISLASNKVYLPVRPDLTYRIADAAVATVEKNMIRPLAAGKTQVDVYDKDTKLSSFELIVTEHQATVFDTLRNNWEDISLANKRYQSNDAQMKAFLGRLDAGVASSLEKWVEPTEQSKTIFNDIDFSKSSHLTTVYRRLEQMAQVVENPDSAYYHDRSLIDLVRKGMNWLYANVYNENKSIDGNWWDYEIGTSRAVVNTLIYMHPYFSQEEILTYTKPISKFVPDPTTIRKTLTNPVPAVGGNQTDLSKVAILEGALREDADRVRAGAQGLTTIMKFVDKGEGFYRDGSFIDHTNVAYTGAYGNVLIEGFSQLLPVIQPTEFALKEEQTNILYEWIEKAFMPILVRGELMDMTRGRSISRATGESHVQAMEILRSLVRIAESAQPEQKTKLLSFVKAQLTSDTFYDSYRSLKSYKDIDLVNKLLADNQIPAEVDKDYIAAFNNMDKFVYRSAQEGFTFALSMYSSRTQNYEDMNNENRKGWYTADGMVYLYNDDLSHYSNHYWATVDPYRLPGTTTTKDKREDGSGEVTLASDFVGASQLGNRLATIAMDFNNWNNSLTARKAWIVLGNKIVFLGTDIQHQSAQGAETTIENRKLLTGEKYSYYINGQPVDLSKEVVTDKTQSFYMTNGKDNQSIGYVFLNQLPTHAKLDQRTGKWSDINYNQSKEEVSNSFVSLWHEHAQTSSNYAYVLVPNQSMEKVNQAAASVKLLHQDRDLQVVYDQEQNVWGVVKYTDTAYKLTDDITLTDAGLYTIQKVEGGYRIAFYNPSTRTVKNGIELTKAGSSLTVEMEPTAAYPSTVWKVTMPEGSDKQTGSVEKTEKEEKQLKENQPSSEVKQVVHHAAEKTKPSKPRLPQTGEEASLGLGFLGLLTLGAVVDFKCRRSHS

SEQ ID NO: 95 - protein, 1164 aa, Streptococcus suis
  hyaluronan lyase
MGFFISQSKQHYGIRKYKVGVCSALIALSILGTRVAANQLPSTETASPQSSQLVETTPETTEAVMTSEVSSEVSPVTSTETQPSSTTAETLASPQAVQATKEEKNLVANGEFISTTAPSGNWKELAATNWETWIPANVKKENGQVRIDEGRLHISSTASYRVAVHQTVDVDPNKRYLFSYDVETKDLKGSGVRVRLRSLTAEGKDLSPQEFAYTPYKNGSQAEHIEQILTVSPETRKLKVELFFENSVGQAWLDNISLVEYVEKTPETPEQSPELVQPETGQISLASNKVYLPVRPDLTYRIADAAVATVEKNMIRPLAAGKTQVDVYDKDTKLSSFELIVTEHQATVFDTLRNNWEDISLANKRYQSNDAQMKAFLGRLDAGVASSLEKWVEPTEQSKTIFNDIDFSKSSHLTTVYRRLEQMAQVVENPDSAYYHDRSLIDLVRKGMNWLYTNVYNENKSIDGNWWDYEIGTPRAVVNTLIYMHPYFSQEEILTYTKPISKFVPDPTTIRKTLTNPVPAVGGNQTDLSKVAILEGALREDADRVRAGAQGLTTIMKFVDKGEGFYRDGSFIDHTNVAYTGAYGNVLIEGFSQLLPVIQPTEFALKEEQTNILYEWIEKAFMPILVRGELMDMTRGRSISRATGESHVQAMEILRSLVRIAESAQPEQKTKLLSFVKAQLTSDTFYDSYRSLKSYKDIDLVNKLLADNQIPAEVDKDYIAAFNNMDKFVYRSAQEGFTFALSMYSSRTQNYEDMNNENRKGWYTADGMVYLYNDDLSHYSNHYWATVDPYRLPGTTTTKDKREDGSGEVTLASDFVGASQLGNRLATIAMDFNNWNNSLTARKAWIVLGNKIVFLGTDIQHQSAQGAETTIENRKLLTGEKYSYYINGQPVDLSKEVVTDKTQSFYMTNGKDNQSIGYVFLNQLPTHAKLDQRTGKWSDINYNQSKEEVSNSFVSLWHEHAQTSSNYAYVLVPNQSMEKVNQAAASVKLLHQDRDLQVVYDQEQNVWGVVKYTDTAYKLTDDITLTDAGLYTIQKVEGGYRIAFYNPSTRTVKNGIELTKAGSSLTVEMEPTAAYPSTVWKVTMPEGSDKQTGSVEKTEKEEKQLKENQPSSEVKQVVHHAAEKTKPSKPRLPQTGEEASLGLGFLGLLTLGAVVDFKCRRSHS

SEQ ID NO: 96 - protein, 802 aa, Vibrio fischeri (strain ATCC 700601 / ES114)
  hyaluronan lyase
MYMIKKHRLNTIALSMLFLFTGNAYAAKNTQTPQYLPSDFEQVRENWAENYLGDPAITFDQTLKNMVTSTNSSAQKHWDSMTPQPNASGIWDDLPLIDKDTTLGPNIRNSYQRLFTMAKAYRLRDGNLENNQLMLNDIMTAMNYINQNFYFVNQLEYGNWWQWELAIPKDIHNILVLLFDDIKDNYQTIITNHLNATRYFTPDPTHLGVSPGAAESTNPNYRESTGGNRTDNAQVVLIRGMLENNSEEISQAIAALPAVIEYVSEGDGYYTDGSFLQHSDIAYNGTYGNVLLGGLGIQMNAVAGSPWSMDNQTISNVYNIINQSYEPLLYKGAMMDMVNGRSISRSAEQNHDVGLNIVNSMLFYTNGPDSDKNKQLSSLIKTQITDDTYQNFFDKIYYVSTYQAAQHIVNDPTVSLKDPLIGNFSYPSMDRIVHRRTDWAFALAMHSYRIGNYECMNGENLKGWFTGDGMIYLYNDQLDHYTGYWPTVNASRMPGTTVDSQIMADCSGERVGGNVNTNMQWVGSTSLNNYGIAGMQFYNWSDTLSAYKSWFMFDNEVVMLGSNIKDQSNANNITTIENRKRLAETKLFIDGTEQAALPYQGAPATFSIRNKTLANSDLSYVMLTPKTISISQNDVDGNWSDIGNSKGDVSDSYLQATLTQVDQADYQYALLPNQNNDTVQNYAQHPDVTVLRQDEQAHAVQENTLNIIAANNWKNNPVNITDTITLNSMMGFMIKEESSNTFTVAVSEPIQTIDSVNFTFDKQGIVIKEDIENRVVLNGTTLTINTSGLQGQSYSFQVTIQD

SEQ ID NO: 97 - protein, 517 aa, Synechococcus sp. (strain RCC307)
  hyaluronan lyase
MGAPAIPKVPRSPSKSEHTTRPNSGESEVVRQAEELFEQTLVNVRGQLAGAVAALESSVHDSELNYGEIFLRDNVPVMVYLLLRGRFEIVRHFLDLCLELQSRSYRTRGVFPTSFVEEDDKILADYGQRSIGRITSVDASLWWPVLCWMYVRASGDTSYGTSPKVQRAVQLLLDLVLQPSFYEPPVLFVPDCAFMIDRPMDVWGAPLEVEVLLFGCLKSCCQLMSLVEGGGHGGPLIQQRLELTRTWMRDLRVYLLNHYWVTSKTMQVLRRRPTEQYGDYQSRNEFNVQPEVIPHWLQEWLDDRGGYLIGNMRTGRPDFRFYSLGNALGSLFGLLTGPQQLALFRLVIHNRQHLMAEMPMRICHPPMDQDEWITNTGMDPKNWPWSYHNGGHWPSLLWPMAAAVLMHQRLYPNDDLLLLGQTRTMLEECYWQQLNQLPRQQWAEYFDGPTGTWVGQQARINQTWTIVGFLLLHHLMRKAPQDVKLLDLDDVGPLRLSFQDQHEKSSTDERKSFLKNY

SEQ ID NO: 98 - protein, 1021 aa, Proteus vulgaris
  chondroitin-sulfate-ABC endolyase
MPIFRFTALAMTLGLLSAPYNAMAATSNPAFDPKNLMQSEIYHFAQNNPLADFSSDKNSILTLSDKRSIMGNQSLLWKWKGGSSFTLHKKLIVPTDKEASKAWGRSSTPVFSFWLYNEKPIDGYLTIDFGEKLISTSEAQAGFKVKLDFTGWRAVGVSLNNDLENREMTLNATNTSSDGTQDSIGRSLGAKVDSIRFKAPSNVSQGEIYIDRIMFSVDDARYQWSDYQVKTRLSEPEIQFHNVKPQLPVTPENLAAIDLIRQRLINEFVGGEKETNLALEENISKLKSDFDALNIHTLANGGTQGRHLITDKQIIIYQPENLNSQDKQLFDNYVILGNYTTLMFNISRAYVLEKDPTQKAQLKQMYLLMTKHLLDQGFVKGSALVTTHHWGYSSRWWYISTLLMSDALKEANLQTQVYDSLLWYSREFKSSFDMKVSADSSDLDYFNTLSRQHLALLLLEPDDQKRINLVNTFSHYITGALTQVPPGGKDGLRPDGTAWRHEGNYPGYSFPAFKNASQLIYLLRDTPFSVGESGWNNLKKAMVSAWIYSNPEVGLPLAGRHPFNSPSLKSVAQGYYWLAMSAKSSPDKTLASIYLAISDKTQNESTAIFGETITPASLPQGFYAFNGGAFGIHRWQDKMVTLKAYNTNVWSSEIYNKDNRYGRYQSHGVAQIVSNGSQLSQGYQQEGWDWNRMEGATTIHLPLKDLDSPKPHTLMQRGERGFSGTSSLEGQYGMMAFNLIYPANLERFDPNFTAKKSVLAADNHLIFIGSNINSSDKNKNVETTLFQHAITPTLNTLWINGQKIENMPYQTTLQQGDWLIDSNGNGYLITQAEKVNVSRQHQVSAENKNRQPTEGNFSSAWIDHSTRPKDASYEYMVFLDATPEKMGEMAQKFRENNGLYQVLRKDKDVHIILDKLSNVTGYAFYQPASIEDKWIKKVNKPAIVMTHRQKDTLIVSAVTPDLNMTRQKAATPVTINVTINGKWQSADKNSEVKYQVSGDNTELTFTSYFGIPQEIKLSPLP

SEQ ID NO: 99 - protein, 684 aa, Pedobacter heparinus
  chondroitin AC lyase
PALLIAQQTGTAELIMKRVMLDLKKPLRNMDKVAEKNLNTLQPDGSWKDVPYKDDAMTNWLPNNHLLQLETIIQAYIEKDSHYYGDDKVFDQISKAFKYWYDSDPKSRNWWHNEIATPQALGEMLILMRYGKKPLDEALVHKLTERMKRGEPEKKTGANKTDIALHYFYRALLTSDEALLSFAVKELFYPVQFVHYEEGLQYDYSYLQHGPQLQISSYGAVFITGVLKLANYVRDTPYALSTEKLAIFSKYYRDSYLKAIRGSYMDFNVEGRGVSRPDILNKKAEKKRLLVAKMIDLKHTEEWADAIARTDSTVAAGYKIEPYHHQFWNGDYVQHLRPAYSFNVRMVSKRTRRSESGNKENLLGRYLSDGATNIQLRGPEYYNIMPVWEWDKIPGITSRDYLTDRPLTKLWGEQGSNDFAGGVSDGVYGASAYALDYDSLQAKKAWFFFDKEIVCLGAGINSNAPENITTTLNQSWLNGPVISTAGKTGRGKITTFKAQGQFWLLHDAIGYYFPEGANLSLSTQSQKGNWFHINNSHSKDEVSGDVFKLWINHGARPENAQYAYIVLPGINKPEEIKKYNGTAPKVLANTNQLQAVYHQQLDMVQAIFYTAGKLSVAGIEIETDKPCAVLIKHINGKQVIWAADPLQKEKTAVLSIRDLKTGKTNRVKIDFPQQEFAGATVELK

SEQ ID NO: 100 - protein, 844 aa, Victivallis vadensis ATCC BAA-548
  chondroitin AC lyase
MHRKIVFPLFVLLFTAFAAFAASQPQWKWRQSKYCRITEHAGKKLLTVAIPADAPEISRRNTADTPVGLTCFEGQPIEFSIRLRNSGISRPDNLHNGIKFQLYFRDGNGTERWTQAEIPHEPFPWRRFRFSERIPADATSGTLRLGLQGSSGNVEFDLDSLQIRPLDPELSPVPPTPEQIRECELIESRLRAGLPAQQPPPGPEVKKLLERQNGDGTFRDLDYSARNRSIWPAARHLKRTFELALARATPGHALYRDPAAGEAVRKAVAWWAERQPQNGNWWWNDMYVPKILGNILLLSPELFPDGPRRRAALNVCRQACFLSRYTGNNRVFIAANIFCRALLERNLPVMDRAAAVLSEEIRFAPAEHKTAWSFGGIRADGCYHQHGPQIQFGNYGGEFLANIAYWSNILKETHWELSPEQWRIMRHLTFNGFQWVLWRGRMDLLACGRQLGRNAAETKGERTLNAFAQLRNADPGDRAPYDAALRRNRDGENTLTGNRHFWNSDYMVHRRPTWYASVRMNSVRVRPIEDDTNWDNALGRYFSDGACLVMRSGREYENITACWDWTRLPGTTLPKTPVYTGEDARRFGLKIGGGDLPRWTHSRNWRQLGETGFVGGVTDGERGAAVYTQDLDGVRARKAWFFDRDAIYCLGSGITSTSPYEVATTVNSCLRNGEIQQGDGWFRHDGIGYRGENLKLTAGPRTGDWRYVEGGLTRPVPETKELFTLTVEHGVKPRNASYIYTILPGATPEETAGTPPGRVLRNTPECQAVEFADGVRAAIFYEPGRLDDFETDTPGVFLIGKGTVHAADPTGRHSSFTLKLNGVSRKVPLPAGEFAGQSVKIVLK

SEQ ID NO: 101 - protein, 510 aa, Pan troglodytes
  Chimpanzee PH20
MGVLKFKHIFFRSFVKSSGVSQIVFTFLLIPCCLTLNFRAPPVIPNVPFLWAWNAPSEFCLGKFDEPLDMSLFSFIGSPRINVTGQDVTIFYVDRLGYYPYIDSITGVTVNGGIPQKISLQDHLDKAKKDITFYMPVDNLGMAVIDWEEWRPTWARNWKPKDVYKNRSIELVQQQNVQLSLTEATEKAKQEFEKAGKDFLVETIKLGKLLRPNHLWGYYLFPDCYNHHYKKPGYNGSCFNVEIKRNDDLSWLWNESTALYPSIYLNTQQSPVAATLYVRNRVQEAIRVSKIPDAKSPLPVFVYTRIVFTDQVLKFLSQDELVYTFGETVALGASGIVIWGTLSIMRSMKSCLLLDNYMETILNPYIINVTLAAKMCSQVLCQEQGVCIRKNWNSSDYLHLNPDNFAIQLEKGGKFTVRGKPTLEDLEQFSEKFYCSCYSTLSCKEKADVKDTDAVDVCIADGVCIDAFLKPPMETEESQIFYNASPSTLSATMFIDLCDLYLVPTSYLIL

SEQ ID NO: 102 - protein, 512 aa, Macaca mulatta
  Precursor Rhesus Monkey PH20
MGVLKFKHIFFRSFVKSSGVSQIVFTFLLIPCCLTLNFRAPPIIPNVPFLWAWNAPSEFCLGKFNEPLDMSLFTLMGSPRINITGQGVTIFYVDRLGYYPYIDLTTGVTVHGGIPQKVSLQDHLDKSKQDILFYMPVDNLGMAVIDWEEWRPTWARNWKPKDVYKNRSIELVQQQNVQLSLPQATDKAKQEFEKAGKDFMLETIKLGRSLRPNHLWGYYLFPDCYNHHYRKPGYNGSCFDVEIKRNDDLSWLWNESTALYPSIYLNTQQSVVVATLYVRNRVREAIRVSKIPDAKNPLPVFVYARLVFTDQVLKFLSREELVSTLGETVALGASGIVIWGSLSITRSMKSCLLLDTYMETILNPYIINVTLAAKMCSQVLCQEQGVCIRKDWNSSDYLHLNPDNFDIRLEKGGKFTVHGKPTVEDLEEFSEKFYCSCYTNLSCKEKADVKDTDAVDVCIADGVCIDASLKPPVETEGSPPIFYNTSSSTVSTTMFIWRLEVWDQGISRIGFF

SEQ ID NO: 103 - protein, 505 aa, Homo sapiens
  PH20 precursor 1-505
MGVLKFKHIFFRSFVKSSGVSQIVFTFLLIPCCLTLNFRAPPVIPNVPFLWAWNAPSEFCLGKFDEPLDMSLFSFIGSPRINATGQGVTIFYVDRLGYYPYIDSITGVTVNGGIPQKISLQDHLDKAKKDITFYMPVDNLGMAVIDWEEWRPTWARNWKPKDVYKNRSIELVQQQNVQLSLTEATEKAKQEFEKAGKDFLVETIKLGKLLRPNHLWGYYLFPDCYNHHYKKPGYNGSCFNVEIKRNDDLSWLWNESTALYPSIYLNTQQSPVAATLYVRNRVREAIRVSKIPDAKSPLPVFAYTRIVFTDQVLKFLSQDELVYTFGETVALGASGIVIWGTLSIMRSMKSCLLLDNYMETILNPYIINVTLAAKMCSQVLCQEQGVCIRKNWNSSDYLHLNPDNFAIQLEKGGKFTVRGKPTLEDLEQFSEKFYCSCYSTLSCKEKADVKDTDAVDVCIADGVCIDAFLKPPMETEEPQIFYNASPSTLSATMFIVSILFLIISS

SEQ ID NO: 104 - protein, 503 aa, Homo sapiens
  PH20 precursor 1-503
MGVLKFKHIFFRSFVKSSGVSQIVFTFLLIPCCLTLNFRAPPVIPNVPFLWAWNAPSEFCLGKFDEPLDMSLFSFIGSPRINATGQGVTIFYVDRLGYYPYIDSITGVTVNGGIPQKISLQDHLDKAKKDITFYMPVDNLGMAVIDWEEWRPTWARNWKPKDVYKNRSIELVQQQNVQLSLTEATEKAKQEFEKAGKDFLVETIKLGKLLRPNHLWGYYLFPDCYNHHYKKPGYNGSCFNVEIKRNDDLSWLWNESTALYPSIYLNTQQSPVAATLYVRNRVREAIRVSKIPDAKSPLPVFAYTRIVFTDQVLKFLSQDELVYTFGETVALGASGIVIWGTLSIMRSMKSCLLLDNYMETILNPYIINVTLAAKMCSQVLCQEQGVCIRKNWNSSDYLHLNPDNFAIQLEKGGKFTVRGKPTLEDLEQFSEKFYCSCYSTLSCKEKADVKDTDAVDVCIADGVCIDAFLKPPMETEEPQIFYNASPSTLSATMFIVSILFLII

SEQ ID NO: 105 - protein, 501 aa, Homo sapiens
  PH20 precursor 1-501
MGVLKFKHIFFRSFVKSSGVSQIVFTFLLIPCCLTLNFRAPPVIPNVPFLWAWNAPSEFCLGKFDEPLDMSLFSFIGSPRINATGQGVTIFYVDRLGYYPYIDSITGVTVNGGIPQKISLQDHLDKAKKDITFYMPVDNLGMAVIDWEEWRPTWARNWKPKDVYKNRSIELVQQQNVQLSLTEATEKAKQEFEKAGKDFLVETIKLGKLLRPNHLWGYYLFPDCYNHHYKKPGYNGSCFNVEIKRNDDLSWLWNESTALYPSIYLNTQQSPVAATLYVRNRVREAIRVSKIPDAKSPLPVFAYTRIVFTDQVLKFLSQDELVYTFGETVALGASGIVIWGTLSIMRSMKSCLLLDNYMETILNPYIINVTLAAKMCSQVLCQEQGVCIRKNWNSSDYLHLNPDNFAIQLEKGGKFTVRGKPTLEDLEQFSEKFYCSCYSTLSCKEKADVKDTDAVDVCIADGVCIDAFLKPPMETEEPQIFYNASPSTLSATMFIVSILFL

SEQ ID NO: 106 - protein, 499 aa, Homo sapiens
  PH20 precursor 1-499
MGVLKFKHIFFRSFVKSSGVSQIVFTFLLIPCCLTLNFRAPPVIPNVPFLWAWNAPSEFCLGKFDEPLDMSLFSFIGSPRINATGQGVTIFYVDRLGYYPYIDSITGVTVNGGIPQKISLQDHLDKAKKDITFYMPVDNLGMAVIDWEEWRPTWARNWKPKDVYKNRSIELVQQQNVQLSLTEATEKAKQEFEKAGKDFLVETIKLGKLLRPNHLWGYYLFPDCYNHHYKKPGYNGSCFNVEIKRNDDLSWLWNESTALYPSIYLNTQQSPVAATLYVRNRVREAIRVSKIPDAKSPLPVFAYTRIVFTDQVLKFLSQDELVYTFGETVALGASGIVIWGTLSIMRSMKSCLLLDNYMETILNPYIINVTLAAKMCSQVLCQEQGVCIRKNWNSSDYLHLNPDNFAIQLEKGGKFTVRGKPTLEDLEQFSEKFYCSCYSTLSCKEKADVKDTDAVDVCIADGVCIDAFLKPPMETEEPQIFYNASPSTLSATMFIVSIL

SEQ ID NO: 107 - protein, 497 aa, Homo sapiens
  PH20 precursor 1-497
MGVLKFKHIFFRSFVKSSGVSQIVFTFLLIPCCLTLNFRAPPVIPNVPFLWAWNAPSEFCLGKFDEPLDMSLFSFIGSPRINATGQGVTIFYVDRLGYYPYIDSITGVTVNGGIPQKISLQDHLDKAKKDITFYMPVDNLGMAVIDWEEWRPTWARNWKPKDVYKNRSIELVQQQNVQLSLTEATEKAKQEFEKAGKDFLVETIKLGKLLRPNHLWGYYLFPDCYNHHYKKPGYNGSCFNVEIKRNDDLSWLWNESTALYPSIYLNTQQSPVAATLYVRNRVREAIRVSKIPDAKSPLPVFAYTRIVFTDQVLKFLSQDELVYTFGETVALGASGIVIWGTLSIMRSMKSCLLLDNYMETILNPYIINVTLAAKMCSQVLCQEQGVCIRKNWNSSDYLHLNPDNFAIQLEKGGKFTVRGKPTLEDLEQFSEKFYCSCYSTLSCKEKADVKDTDAVDVCIADGVCIDAFLKPPMETEEPQIFYNASPSTLSATMFIVS

SEQ ID NO: 108 - protein, 495 aa, Homo sapiens
  PH20 precursor 1-495
MGVLKFKHIFFRSFVKSSGVSQIVFTFLLIPCCLTLNFRAPPVIPNVPFLWAWNAPSEFCLGKFDEPLDMSLFSFIGSPRINATGQGVTIFYVDRLGYYPYIDSITGVTVNGGIPQKISLQDHLDKAKKDITFYMPVDNLGMAVIDWEEWRPTWARNWKPKDVYKNRSIELVQQQNVQLSLTEATEKAKQEFEKAGKDFLVETIKLGKLLRPNHLWGYYLFPDCYNHHYKKPGYNGSCFNVEIKRNDDLSWLWNESTALYPSIYLNTQQSPVAATLYVRNRVREAIRVSKIPDAKSPLPVFAYTRIVFTDQVLKFLSQDELVYTFGETVALGASGIVIWGTLSIMRSMKSCLLLDNYMETILNPYIINVTLAAKMCSQVLCQEQGVCIRKNWNSSDYLHLNPDNFAIQLEKGGKFTVRGKPTLEDLEQFSEKFYCSCYSTLSCKEKADVKDTDAVDVCIADGVCIDAFLKPPMETEEPQIFYNASPSTLSATMFI

SEQ ID NO: 109 - protein, 493 aa, Homo sapiens
  PH20 precursor 1-493
MGVLKFKHIFFRSFVKSSGVSQIVFTFLLIPCCLTLNFRAPPVIPNVPFLWAWNAPSEFCLGKFDEPLDMSLFSFIGSPRINATGQGVTIFYVDRLGYYPYIDSITGVTVNGGIPQKISLQDHLDKAKKDITFYMPVDNLGMAVIDWEEWRPTWARNWKPKDVYKNRSIELVQQQNVQLSLTEATEKAKQEFEKAGKDFLVETIKLGKLLRPNHLWGYYLFPDCYNHHYKKPGYNGSCFNVEIKRNDDLSWLWNESTALYPSIYLNTQQSPVAATLYVRNRVREAIRVSKIPDAKSPLPVFAYTRIVFTDQVLKFLSQDELVYTFGETVALGASGIVIWGTLSIMRSMKSCLLLDNYMETILNPYIINVTLAAKMCSQVLCQEQGVCIRKNWNSSDYLHLNPDNFAIQLEKGGKFTVRGKPTLEDLEQFSEKFYCSCYSTLSCKEKADVKDTDAVDVCIADGVCIDAFLKPPMETEEPQIFYNASPSTLSATM

SEQ ID NO: 110 - protein, 491 aa, Homo sapiens
  PH20 precursor 1-491
MGVLKFKHIFFRSFVKSSGVSQIVFTFLLIPCCLTLNFRAPPVIPNVPFLWAWNAPSEFCLGKFDEPLDMSLFSFIGSPRINATGQGVTIFYVDRLGYYPYIDSITGVTVNGGIPQKISLQDHLDKAKKDITFYMPVDNLGMAVIDWEEWRPTWARNWKPKDVYKNRSIELVQQQNVQLSLTEATEKAKQEFEKAGKDFLVETIKLGKLLRPNHLWGYYLFPDCYNHHYKKPGYNGSCFNVEIKRNDDLSWLWNESTALYPSIYLNTQQSPVAATLYVRNRVREAIRVSKIPDAKSPLPVFAYTRIVFTDQVLKFLSQDELVYTFGETVALGASGIVIWGTLSIMRSMKSCLLLDNYMETILNPYIINVTLAAKMCSQVLCQEQGVCIRKNWNSSDYLHLNPDNFAIQLEKGGKFTVRGKPTLEDLEQFSEKFYCSCYSTLSCKEKADVKDTDAVDVCIADGVCIDAFLKPPMETEEPQIFYNASPSTLSA

SEQ ID NO: 111 - protein, 489 aa, Homo sapiens
  PH20 precursor 1-489
MGVLKFKHIFFRSFVKSSGVSQIVFTFLLIPCCLTLNFRAPPVIPNVPFLWAWNAPSEFCLGKFDEPLDMSLFSFIGSPRINATGQGVTIFYVDRLGYYPYIDSITGVTVNGGIPQKISLQDHLDKAKKDITFYMPVDNLGMAVIDWEEWRPTWARNWKPKDVYKNRSIELVQQQNVQLSLTEATEKAKQEFEKAGKDFLVETIKLGKLLRPNHLWGYYLFPDCYNHHYKKPGYNGSCFNVEIKRNDDLSWLWNESTALYPSIYLNTQQSPVAATLYVRNRVREAIRVSKIPDAKSPLPVFAYTRIVFTDQVLKFLSQDELVYTFGETVALGASGIVIWGTLSIMRSMKSCLLLDNYMETILNPYIINVTLAAKMCSQVLCQEQGVCIRKNWNSSDYLHLNPDNFAIQLEKGGKFTVRGKPTLEDLEQFSEKFYCSCYSTLSCKEKADVKDTDAVDVCIADGVCIDAFLKPPMETEEPQIFYNASPSTL

SEQ ID NO: 112 - protein, 490 aa, Homo sapiens
  PH20 precursor 1-490
MGVLKFKHIFFRSFVKSSGVSQIVFTFLLIPCCLTLNFRAPPVIPNVPFLWAWNAPSEFCLGKFDEPLDMSLFSFIGSPRINATGQGVTIFYVDRLGYYPYIDSITGVTVNGGIPQKISLQDHLDKAKKDITFYMPVDNLGMAVIDWEEWRPTWARNWKPKDVYKNRSIELVQQQNVQLSLTEATEKAKQEFEKAGKDFLVETIKLGKLLRPNHLWGYYLFPDCYNHHYKKPGYNGSCFNVEIKRNDDLSWLWNESTALYPSIYLNTQQSPVAATLYVRNRVREAIRVSKIPDAKSPLPVFAYTRIVFTDQVLKFLSQDELVYTFGETVALGASGIVIWGTLSIMRSMKSCLLLDNYMETILNPYIINVTLAAKMCSQVLCQEQGVCIRKNWNSSDYLHLNPDNFAIQLEKGGKFTVRGKPTLEDLEQFSEKFYCSCYSTLSCKEKADVKDTDAVDVCIADGVCIDAFLKPPMETEEPQIFYNASPSTLS

SEQ ID NO: 113 - protein, 487 aa, Homo sapiens
  PH20 precursor 1-487
MGVLKFKHIFFRSFVKSSGVSQIVFTFLLIPCCLTLNFRAPPVIPNVPFLWAWNAPSEFCLGKFDEPLDMSLFSFIGSPRINATGQGVTIFYVDRLGYYPYIDSITGVTVNGGIPQKISLQDHLDKAKKDITFYMPVDNLGMAVIDWEEWRPTWARNWKPKDVYKNRSIELVQQQNVQLSLTEATEKAKQEFEKAGKDFLVETIKLGKLLRPNHLWGYYLFPDCYNHHYKKPGYNGSCFNVEIKRNDDLSWLWNESTALYPSIYLNTQQSPVAATLYVRNRVREAIRVSKIPDAKSPLPVFAYTRIVFTDQVLKFLSQDELVYTFGETVALGASGIVIWGTLSIMRSMKSCLLLDNYMETILNPYIINVTLAAKMCSQVLCQEQGVCIRKNWNSSDYLHLNPDNFAIQLEKGGKFTVRGKPTLEDLEQFSEKFYCSCYSTLSCKEKADVKDTDAVDVCIADGVCIDAFLKPPMETEEPQIFYNASPS

SEQ ID NO: 114 - protein, 485 aa, Homo sapiens
  PH20 precursor 1-485
MGVLKFKHIFFRSFVKSSGVSQIVFTFLLIPCCLTLNFRAPPVIPNVPFLWAWNAPSEFCLGKFDEPLDMSLFSFIGSPRINATGQGVTIFYVDRLGYYPYIDSITGVTVNGGIPQKISLQDHLDKAKKDITFYMPVDNLGMAVIDWEEWRPTWARNWKPKDVYKNRSIELVQQQNVQLSLTEATEKAKQEFEKAGKDFLVETIKLGKLLRPNHLWGYYLFPDCYNHHYKKPGYNGSCFNVEIKRNDDLSWLWNESTALYPSIYLNTQQSPVAATLYVRNRVREAIRVSKIPDAKSPLPVFAYTRIVFTDQVLKFLSQDELVYTFGETVALGASGIVIWGTLSIMRSMKSCLLLDNYMETILNPYIINVTLAAKMCSQVLCQEQGVCIRKNWNSSDYLHLNPDNFAIQLEKGGKFTVRGKPTLEDLEQFSEKFYCSCYSTLSCKEKADVKDTDAVDVCIADGVCIDAFLKPPMETEEPQIFYNAS

SEQ ID NO: 115 - protein, 484 aa, Homo sapiens
  PH20 precursor 1-484
MGVLKFKHIFFRSFVKSSGVSQIVFTFLLIPCCLTLNFRAPPVIPNVPFLWAWNAPSEFCLGKFDEPLDMSLFSFIGSPRINATGQGVTIFYVDRLGYYPYIDSITGVTVNGGIPQKISLQDHLDKAKKDITFYMPVDNLGMAVIDWEEWRPTWARNWKPKDVYKNRSIELVQQQNVQLSLTEATEKAKQEFEKAGKDFLVETIKLGKLLRPNHLWGYYLFPDCYNHHYKKPGYNGSCFNVEIKRNDDLSWLWNESTALYPSIYLNTQQSPVAATLYVRNRVREAIRVSKIPDAKSPLPVFAYTRIVFTDQVLKFLSQDELVYTFGETVALGASGIVIWGTLSIMRSMKSCLLLDNYMETILNPYIINVTLAAKMCSQVLCQEQGVCIRKNWNSSDYLHLNPDNFAIQLEKGGKFTVRGKPTLEDLEQFSEKFYCSCYSTLSCKEKADVKDTDAVDVCIADGVCIDAFLKPPMETEEPQIFYNA

SEQ ID NO: 116 - protein, 476 aa, Homo sapiens
  PH20 precursor 1-476
MGVLKFKHIFFRSFVKSSGVSQIVFTFLLIPCCLTLNFRAPPVIPNVPFLWAWNAPSEFCLGKFDEPLDMSLFSFIGSPRINATGQGVTIFYVDRLGYYPYIDSITGVTVNGGIPQKISLQDHLDKAKKDITFYMPVDNLGMAVIDWEEWRPTWARNWKPKDVYKNRSIELVQQQNVQLSLTEATEKAKQEFEKAGKDFLVETIKLGKLLRPNHLWGYYLFPDCYNHHYKKPGYNGSCFNVEIKRNDDLSWLWNESTALYPSIYLNTQQSPVAATLYVRNRVREAIRVSKIPDAKSPLPVFAYTRIVFTDQVLKFLSQDELVYTFGETVALGASGIVIWGTLSIMRSMKSCLLLDNYMETILNPYIINVTLAAKMCSQVLCQEQGVCIRKNWNSSDYLHLNPDNFAIQLEKGGKFTVRGKPTLEDLEQFSEKFYCSCYSTLSCKEKADVKDTDAVDVCIADGVCIDAFLKPPMETE

SEQ ID NO: 117 - protein, 475 aa, Homo sapiens
  PH20 precursor 1-475
MGVLKFKHIFFRSFVKSSGVSQIVFTFLLIPCCLTLNFRAPPVIPNVPFLWAWNAPSEFCLGKFDEPLDMSLFSFIGSPRINATGQGVTIFYVDRLGYYPYIDSITGVTVNGGIPQKISLQDHLDKAKKDITFYMPVDNLGMAVIDWEEWRPTWARNWKPKDVYKNRSIELVQQQNVQLSLTEATEKAKQEFEKAGKDFLVETIKLGKLLRPNHLWGYYLFPDCYNHHYKKPGYNGSCFNVEIKRNDDLSWLWNESTALYPSIYLNTQQSPVAATLYVRNRVREAIRVSKIPDAKSPLPVFAYTRIVFTDQVLKFLSQDELVYTFGETVALGASGIVIWGTLSIMRSMKSCLLLDNYMETILNPYIINVTLAAKMCSQVLCQEQGVCIRKNWNSSDYLHLNPDNFAIQLEKGGKFTVRGKPTLEDLEQFSEKFYCSCYSTLSCKEKADVKDTDAVDVCIADGVCIDAFLKPPMET

SEQ ID NO: 118 - protein, 474 aa, Homo sapiens
  PH20 precursor 1-474
MGVLKFKHIFFRSFVKSSGVSQIVFTFLLIPCCLTLNFRAPPVIPNVPFLWAWNAPSEFCLGKFDEPLDMSLFSFIGSPRINATGQGVTIFYVDRLGYYPYIDSITGVTVNGGIPQKISLQDHLDKAKKDITFYMPVDNLGMAVIDWEEWRPTWARNWKPKDVYKNRSIELVQQQNVQLSLTEATEKAKQEFEKAGKDFLVETIKLGKLLRPNHLWGYYLFPDCYNHHYKKPGYNGSCFNVEIKRNDDLSWLWNESTALYPSIYLNTQQSPVAATLYVRNRVREAIRVSKIPDAKSPLPVFAYTRIVFTDQVLKFLSQDELVYTFGETVALGASGIVIWGTLSIMRSMKSCLLLDNYMETILNPYIINVTLAAKMCSQVLCQEQGVCIRKNWNSSDYLHLNPDNFAIQLEKGGKFTVRGKPTLEDLEQFSEKFYCSCYSTLSCKEKADVKDTDAVDVCIADGVCIDAFLKPPME

SEQ ID NO: 119 - protein, 473 aa, Homo sapiens
  PH20 precursor 1-473
MGVLKFKHIFFRSFVKSSGVSQIVFTFLLIPCCLTLNFRAPPVIPNVPFLWAWNAPSEFCLGKFDEPLDMSLFSFIGSPRINATGQGVTIFYVDRLGYYPYIDSITGVTVNGGIPQKISLQDHLDKAKKDITFYMPVDNLGMAVIDWEEWRPTWARNWKPKDVYKNRSIELVQQQNVQLSLTEATEKAKQEFEKAGKDFLVETIKLGKLLRPNHLWGYYLFPDCYNHHYKKPGYNGSCFNVEIKRNDDLSWLWNESTALYPSIYLNTQQSPVAATLYVRNRVREAIRVSKIPDAKSPLPVFAYTRIVFTDQVLKFLSQDELVYTFGETVALGASGIVIWGTLSIMRSMKSCLLLDNYMETILNPYIINVTLAAKMCSQVLCQEQGVCIRKNWNSSDYLHLNPDNFAIQLEKGGKFTVRGKPTLEDLEQFSEKFYCSCYSTLSCKEKADVKDTDAVDVCIADGVCIDAFLKPPM

SEQ ID NO: 120 - protein, 472 aa, Homo sapiens
  PH20 precursor 1-472
MGVLKFKHIFFRSFVKSSGVSQIVFTFLLIPCCLTLNFRAPPVIPNVPFLWAWNAPSEFCLGKFDEPLDMSLFSFIGSPRINATGQGVTIFYVDRLGYYPYIDSITGVTVNGGIPQKISLQDHLDKAKKDITFYMPVDNLGMAVIDWEEWRPTWARNWKPKDVYKNRSIELVQQQNVQLSLTEATEKAKQEFEKAGKDFLVETIKLGKLLRPNHLWGYYLFPDCYNHHYKKPGYNGSCFNVEIKRNDDLSWLWNESTALYPSIYLNTQQSPVAATLYVRNRVREAIRVSKIPDAKSPLPVFAYTRIVFTDQVLKFLSQDELVYTFGETVALGASGIVIWGTLSIMRSMKSCLLLDNYMETILNPYIINVTLAAKMCSQVLCQEQGVCIRKNWNSSDYLHLNPDNFAIQLEKGGKFTVRGKPTLEDLEQFSEKFYCSCYSTLSCKEKADVKDTDAVDVCIADGVCIDAFLKPP

SEQ ID NO: 121 - protein, 471 aa, Homo sapiens
  PH20 precursor 1-471
MGVLKFKHIFFRSFVKSSGVSQIVFTFLLIPCCLTLNFRAPPVIPNVPFLWAWNAPSEFCLGKFDEPLDMSLFSFIGSPRINATGQGVTIFYVDRLGYYPYIDSITGVTVNGGIPQKISLQDHLDKAKKDITFYMPVDNLGMAVIDWEEWRPTWARNWKPKDVYKNRSIELVQQQNVQLSLTEATEKAKQEFEKAGKDFLVETIKLGKLLRPNHLWGYYLFPDCYNHHYKKPGYNGSCFNVEIKRNDDLSWLWNESTALYPSIYLNTQQSPVAATLYVRNRVREAIRVSKIPDAKSPLPVFAYTRIVFTDQVLKFLSQDELVYTFGETVALGASGIVIWGTLSIMRSMKSCLLLDNYMETILNPYIINVTLAAKMCSQVLCQEQGVCIRKNWNSSDYLHLNPDNFAIQLEKGGKFTVRGKPTLEDLEQFSEKFYCSCYSTLSCKEKADVKDTDAVDVCIADGVCIDAFLKP

SEQ ID NO: 122 - protein, 470 aa, Homo sapiens
  PH20 precursor 1-470
MGVLKFKHIFFRSFVKSSGVSQIVFTFLLIPCCLTLNFRAPPVIPNVPFLWAWNAPSEFCLGKFDEPLDMSLFSFIGSPRINATGQGVTIFYVDRLGYYPYIDSITGVTVNGGIPQKISLQDHLDKAKKDITFYMPVDNLGMAVIDWEEWRPTWARNWKPKDVYKNRSIELVQQQNVQLSLTEATEKAKQEFEKAGKDFLVETIKLGKLLRPNHLWGYYLFPDCYNHHYKKPGYNGSCFNVEIKRNDDLSWLWNESTALYPSIYLNTQQSPVAATLYVRNRVREAIRVSKIPDAKSPLPVFAYTRIVFTDQVLKFLSQDELVYTFGETVALGASGIVIWGTLSIMRSMKSCLLLDNYMETILNPYIINVTLAAKMCSQVLCQEQGVCIRKNWNSSDYLHLNPDNFAIQLEKGGKFTVRGKPTLEDLEQFSEKFYCSCYSTLSCKEKADVKDTDAVDVCIADGVCIDAFLK

SEQ ID NO: 123 - protein, 469 aa, Homo sapiens
  PH20 precursor 1-469
MGVLKFKHIFFRSFVKSSGVSQIVFTFLLIPCCLTLNFRAPPVIPNVPFLWAWNAPSEFCLGKFDEPLDMSLFSFIGSPRINATGQGVTIFYVDRLGYYPYIDSITGVTVNGGIPQKISLQDHLDKAKKDITFYMPVDNLGMAVIDWEEWRPTWARNWKPKDVYKNRSIELVQQQNVQLSLTEATEKAKQEFEKAGKDFLVETIKLGKLLRPNHLWGYYLFPDCYNHHYKKPGYNGSCFNVEIKRNDDLSWLWNESTALYPSIYLNTQQSPVAATLYVRNRVREAIRVSKIPDAKSPLPVFAYTRIVFTDQVLKFLSQDELVYTFGETVALGASGIVIWGTLSIMRSMKSCLLLDNYMETILNPYIINVTLAAKMCSQVLCQEQGVCIRKNWNSSDYLHLNPDNFAIQLEKGGKFTVRGKPTLEDLEQFSEKFYCSCYSTLSCKEKADVKDTDAVDVCIADGVCIDAFL

SEQ ID NO: 124 - protein, 468 aa, Homo sapiens
  PH20 precursor 1-468
MGVLKFKHIFFRSFVKSSGVSQIVFTFLLIPCCLTLNFRAPPVIPNVPFLWAWNAPSEFCLGKFDEPLDMSLFSFIGSPRINATGQGVTIFYVDRLGYYPYIDSITGVTVNGGIPQKISLQDHLDKAKKDITFYMPVDNLGMAVIDWEEWRPTWARNWKPKDVYKNRSIELVQQQNVQLSLTEATEKAKQEFEKAGKDFLVETIKLGKLLRPNHLWGYYLFPDCYNHHYKKPGYNGSCFNVEIKRNDDLSWLWNESTALYPSIYLNTQQSPVAATLYVRNRVREAIRVSKIPDAKSPLPVFAYTRIVFTDQVLKFLSQDELVYTFGETVALGASGIVIWGTLSIMRSMKSCLLLDNYMETILNPYIINVTLAAKMCSQVLCQEQGVCIRKNWNSSDYLHLNPDNFAIQLEKGGKFTVRGKPTLEDLEQFSEKFYCSCYSTLSCKEKADVKDTDAVDVCIADGVCIDAF

SEQ ID NO: 125 - protein, 466 aa, Homo sapiens
  PH20 precursor 1-466
MGVLKFKHIFFRSFVKSSGVSQIVFTFLLIPCCLTLNFRAPPVIPNVPFLWAWNAPSEFCLGKFDEPLDMSLFSFIGSPRINATGQGVTIFYVDRLGYYPYIDSITGVTVNGGIPQKISLQDHLDKAKKDITFYMPVDNLGMAVIDWEEWRPTWARNWKPKDVYKNRSIELVQQQNVQLSLTEATEKAKQEFEKAGKDFLVETIKLGKLLRPNHLWGYYLFPDCYNHHYKKPGYNGSCFNVEIKRNDDLSWLWNESTALYPSIYLNTQQSPVAATLYVRNRVREAIRVSKIPDAKSPLPVFAYTRIVFTDQVLKFLSQDELVYTFGETVALGASGIVIWGTLSIMRSMKSCLLLDNYMETILNPYIINVTLAAKMCSQVLCQEQGVCIRKNWNSSDYLHLNPDNFAIQLEKGGKFTVRGKPTLEDLEQFSEKFYCSCYSTLSCKEKADVKDTDAVDVCIADGVCID

SEQ ID NO: 126 - protein, 465 aa, Homo sapiens
  PH20 precursor 1-465
MGVLKFKHIFFRSFVKSSGVSQIVFTFLLIPCCLTLNFRAPPVIPNVPFLWAWNAPSEFCLGKFDEPLDMSLFSFIGSPRINATGQGVTIFYVDRLGYYPYIDSITGVTVNGGIPQKISLQDHLDKAKKDITFYMPVDNLGMAVIDWEEWRPTWARNWKPKDVYKNRSIELVQQQNVQLSLTEATEKAKQEFEKAGKDFLVETIKLGKLLRPNHLWGYYLFPDCYNHHYKKPGYNGSCFNVEIKRNDDLSWLWNESTALYPSIYLNTQQSPVAATLYVRNRVREAIRVSKIPDAKSPLPVFAYTRIVFTDQVLKFLSQDELVYTFGETVALGASGIVIWGTLSIMRSMKSCLLLDNYMETILNPYIINVTLAAKMCSQVLCQEQGVCIRKNWNSSDYLHLNPDNFAIQLEKGGKFTVRGKPTLEDLEQFSEKFYCSCYSTLSCKEKADVKDTDAVDVCIADGVCI

SEQ ID NO: 127 - protein, 464 aa, Homo sapiens
  PH20 precursor 1-464
MGVLKFKHIFFRSFVKSSGVSQIVFTFLLIPCCLTLNFRAPPVIPNVPFLWAWNAPSEFCLGKFDEPLDMSLFSFIGSPRINATGQGVTIFYVDRLGYYPYIDSITGVTVNGGIPQKISLQDHLDKAKKDITFYMPVDNLGMAVIDWEEWRPTWARNWKPKDVYKNRSIELVQQQNVQLSLTEATEKAKQEFEKAGKDFLVETIKLGKLLRPNHLWGYYLFPDCYNHHYKKPGYNGSCFNVEIKRNDDLSWLWNESTALYPSIYLNTQQSPVAATLYVRNRVREAIRVSKIPDAKSPLPVFAYTRIVFTDQVLKFLSQDELVYTFGETVALGASGIVIWGTLSIMRSMKSCLLLDNYMETILNPYIINVTLAAKMCSQVLCQEQGVCIRKNWNSSDYLHLNPDNFAIQLEKGGKFTVRGKPTLEDLEQFSEKFYCSCYSTLSCKEKADVKDTDAVDVCIADGVC

SEQ ID NO: 128 - protein, 462 aa, Homo sapiens
  PH20 precursor 1-462
MGVLKFKHIFFRSFVKSSGVSQIVFTFLLIPCCLTLNFRAPPVIPNVPFLWAWNAPSEFCLGKFDEPLDMSLFSFIGSPRINATGQGVTIFYVDRLGYYPYIDSITGVTVNGGIPQKISLQDHLDKAKKDITFYMPVDNLGMAVIDWEEWRPTWARNWKPKDVYKNRSIELVQQQNVQLSLTEATEKAKQEFEKAGKDFLVETIKLGKLLRPNHLWGYYLFPDCYNHHYKKPGYNGSCFNVEIKRNDDLSWLWNESTALYPSIYLNTQQSPVAATLYVRNRVREAIRVSKIPDAKSPLPVFAYTRIVFTDQVLKFLSQDELVYTFGETVALGASGIVIWGTLSIMRSMKSCLLLDNYMETILNPYIINVTLAAKMCSQVLCQEQGVCIRKNWNSSDYLHLNPDNFAIQLEKGGKFTVRGKPTLEDLEQFSEKFYCSCYSTLSCKEKADVKDTDAVDVCIADG

SEQ ID NO: 129 - protein, 460 aa, Homo sapiens
  PH20 precursor 1-460
MGVLKFKHIFFRSFVKSSGVSQIVFTFLLIPCCLTLNFRAPPVIPNVPFLWAWNAPSEFCLGKFDEPLDMSLFSFIGSPRINATGQGVTIFYVDRLGYYPYIDSITGVTVNGGIPQKISLQDHLDKAKKDITFYMPVDNLGMAVIDWEEWRPTWARNWKPKDVYKNRSIELVQQQNVQLSLTEATEKAKQEFEKAGKDFLVETIKLGKLLRPNHLWGYYLFPDCYNHHYKKPGYNGSCFNVEIKRNDDLSWLWNESTALYPSIYLNTQQSPVAATLYVRNRVREAIRVSKIPDAKSPLPVFAYTRIVFTDQVLKFLSQDELVYTFGETVALGASGIVIWGTLSIMRSMKSCLLLDNYMETILNPYIINVTLAAKMCSQVLCQEQGVCIRKNWNSSDYLHLNPDNFAIQLEKGGKFTVRGKPTLEDLEQFSEKFYCSCYSTLSCKEKADVKDTDAVDVCIA

SEQ ID NO: 130 - protein, 458 aa, Homo sapiens
  PH20 precursor 1-458
MGVLKFKHIFFRSFVKSSGVSQIVFTFLLIPCCLTLNFRAPPVIPNVPFLWAWNAPSEFCLGKFDEPLDMSLFSFIGSPRINATGQGVTIFYVDRLGYYPYIDSITGVTVNGGIPQKISLQDHLDKAKKDITFYMPVDNLGMAVIDWEEWRPTWARNWKPKDVYKNRSIELVQQQNVQLSLTEATEKAKQEFEKAGKDFLVETIKLGKLLRPNHLWGYYLFPDCYNHHYKKPGYNGSCFNVEIKRNDDLSWLWNESTALYPSIYLNTQQSPVAATLYVRNRVREAIRVSKIPDAKSPLPVFAYTRIVFTDQVLKFLSQDELVYTFGETVALGASGIVIWGTLSIMRSMKSCLLLDNYMETILNPYIINVTLAAKMCSQVLCQEQGVCIRKNWNSSDYLHLNPDNFAIQLEKGGKFTVRGKPTLEDLEQFSEKFYCSCYSTLSCKEKADVKDTDAVDVC

SEQ ID NO: 131 - protein, 456 aa, Homo sapiens
  PH20 precursor 1-456
MGVLKFKHIFFRSFVKSSGVSQIVFTFLLIPCCLTLNFRAPPVIPNVPFLWAWNAPSEFCLGKFDEPLDMSLFSFIGSPRINATGQGVTIFYVDRLGYYPYIDSITGVTVNGGIPQKISLQDHLDKAKKDITFYMPVDNLGMAVIDWEEWRPTWARNWKPKDVYKNRSIELVQQQNVQLSLTEATEKAKQEFEKAGKDFLVETIKLGKLLRPNHLWGYYLFPDCYNHHYKKPGYNGSCFNVEIKRNDDLSWLWNESTALYPSIYLNTQQSPVAATLYVRNRVREAIRVSKIPDAKSPLPVFAYTRIVFTDQVLKFLSQDELVYTFGETVALGASGIVIWGTLSIMRSMKSCLLLDNYMETILNPYIINVTLAAKMCSQVLCQEQGVCIRKNWNSSDYLHLNPDNFAIQLEKGGKFTVRGKPTLEDLEQFSEKFYCSCYSTLSCKEKADVKDTDAVD

SEQ ID NO: 132 - protein, 454 aa, Homo sapiens
  PH20 precursor 1-454
MGVLKFKHIFFRSFVKSSGVSQIVFTFLLIPCCLTLNFRAPPVIPNVPFLWAWNAPSEFCLGKFDEPLDMSLFSFIGSPRINATGQGVTIFYVDRLGYYPYIDSITGVTVNGGIPQKISLQDHLDKAKKDITFYMPVDNLGMAVIDWEEWRPTWARNWKPKDVYKNRSIELVQQQNVQLSLTEATEKAKQEFEKAGKDFLVETIKLGKLLRPNHLWGYYLFPDCYNHHYKKPGYNGSCFNVEIKRNDDLSWLWNESTALYPSIYLNTQQSPVAATLYVRNRVREAIRVSKIPDAKSPLPVFAYTRIVFTDQVLKFLSQDELVYTFGETVALGASGIVIWGTLSIMRSMKSCLLLDNYMETILNPYIINVTLAAKMCSQVLCQEQGVCIRKNWNSSDYLHLNPDNFAIQLEKGGKFTVRGKPTLEDLEQFSEKFYCSCYSTLSCKEKADVKDTDA

SEQ ID NO: 133 - protein, 452 aa, Homo sapiens
  PH20 precursor 1-452
MGVLKFKHIFFRSFVKSSGVSQIVFTFLLIPCCLTLNFRAPPVIPNVPFLWAWNAPSEFCLGKFDEPLDMSLFSFIGSPRINATGQGVTIFYVDRLGYYPYIDSITGVTVNGGIPQKISLQDHLDKAKKDITFYMPVDNLGMAVIDWEEWRPTWARNWKPKDVYKNRSIELVQQQNVQLSLTEATEKAKQEFEKAGKDFLVETIKLGKLLRPNHLWGYYLFPDCYNHHYKKPGYNGSCFNVEIKRNDDLSWLWNESTALYPSIYLNTQQSPVAATLYVRNRVREAIRVSKIPDAKSPLPVFAYTRIVFTDQVLKFLSQDELVYTFGETVALGASGIVIWGTLSIMRSMKSCLLLDNYMETILNPYIINVTLAAKMCSQVLCQEQGVCIRKNWNSSDYLHLNPDNFAIQLEKGGKFTVRGKPTLEDLEQFSEKFYCSCYSTLSCKEKADVKDT

SEQ ID NO: 134 - protein, 450 aa, Homo sapiens
  PH20 precursor 1-450
MGVLKFKHIFFRSFVKSSGVSQIVFTFLLIPCCLTLNFRAPPVIPNVPFLWAWNAPSEFCLGKFDEPLDMSLFSFIGSPRINATGQGVTIFYVDRLGYYPYIDSITGVTVNGGIPQKISLQDHLDKAKKDITFYMPVDNLGMAVIDWEEWRPTWARNWKPKDVYKNRSIELVQQQNVQLSLTEATEKAKQEFEKAGKDFLVETIKLGKLLRPNHLWGYYLFPDCYNHHYKKPGYNGSCFNVEIKRNDDLSWLWNESTALYPSIYLNTQQSPVAATLYVRNRVREAIRVSKIPDAKSPLPVFAYTRIVFTDQVLKFLSQDELVYTFGETVALGASGIVIWGTLSIMRSMKSCLLLDNYMETILNPYIINVTLAAKMCSQVLCQEQGVCIRKNWNSSDYLHLNPDNFAIQLEKGGKFTVRGKPTLEDLEQFSEKFYCSCYSTLSCKEKADVK

SEQ ID NO: 135 - protein, 508 aa, Homo sapiens
  PH20 precursor 1-508
MGVLKFKHIFFRSFVKSSGVSQIVFTFLLIPCCLTLNFRAPPVIPNVPFLWAWNAPSEFCLGKFDEPLDMSLFSFIGSPRINATGQGVTIFYVDRLGYYPYIDSITGVTVNGGIPQKISLQDHLDKAKKDITFYMPVDNLGMAVIDWEEWRPTWARNWKPKDVYKNRSIELVQQQNVQLSLTEATEKAKQEFEKAGKDFLVETIKLGKLLRPNHLWGYYLFPDCYNHHYKKPGYNGSCFNVEIKRNDDLSWLWNESTALYPSIYLNTQQSPVAATLYVRNRVREAIRVSKIPDAKSPLPVFAYTRIVFTDQVLKFLSQDELVYTFGETVALGASGIVIWGTLSIMRSMKSCLLLDNYMETILNPYIINVTLAAKMCSQVLCQEQGVCIRKNWNSSDYLHLNPDNFAIQLEKGGKFTVRGKPTLEDLEQFSEKFYCSCYSTLSCKEKADVKDTDAVDVCIADGVCIDAFLKPPMETEEPQIFYNASPSTLSATMFIVSILFLIISSVAS

SEQ ID NO: 136 - protein, 506 aa, Homo sapiens
  PH20 precursor 1-506
MGVLKFKHIFFRSFVKSSGVSQIVFTFLLIPCCLTLNFRAPPVIPNVPFLWAWNAPSEFCLGKFDEPLDMSLFSFIGSPRINATGQGVTIFYVDRLGYYPYIDSITGVTVNGGIPQKISLQDHLDKAKKDITFYMPVDNLGMAVIDWEEWRPTWARNWKPKDVYKNRSIELVQQQNVQLSLTEATEKAKQEFEKAGKDFLVETIKLGKLLRPNHLWGYYLFPDCYNHHYKKPGYNGSCFNVEIKRNDDLSWLWNESTALYPSIYLNTQQSPVAATLYVRNRVREAIRVSKIPDAKSPLPVFAYTRIVFTDQVLKFLSQDELVYTFGETVALGASGIVIWGTLSIMRSMKSCLLLDNYMETILNPYIINVTLAAKMCSQVLCQEQGVCIRKNWNSSDYLHLNPDNFAIQLEKGGKFTVRGKPTLEDLEQFSEKFYCSCYSTLSCKEKADVKDTDAVDVCIADGVCIDAFLKPPMETEEPQIFYNASPSTLSATMFIVSILFLIISSV

SEQ ID NO: 137 - protein, 504 aa, Homo sapiens
  PH20 precursor 1-504
MGVLKFKHIFFRSFVKSSGVSQIVFTFLLIPCCLTLNFRAPPVIPNVPFLWAWNAPSEFCLGKFDEPLDMSLFSFIGSPRINATGQGVTIFYVDRLGYYPYIDSITGVTVNGGIPQKISLQDHLDKAKKDITFYMPVDNLGMAVIDWEEWRPTWARNWKPKDVYKNRSIELVQQQNVQLSLTEATEKAKQEFEKAGKDFLVETIKLGKLLRPNHLWGYYLFPDCYNHHYKKPGYNGSCFNVEIKRNDDLSWLWNESTALYPSIYLNTQQSPVAATLYVRNRVREAIRVSKIPDAKSPLPVFAYTRIVFTDQVLKFLSQDELVYTFGETVALGASGIVIWGTLSIMRSMKSCLLLDNYMETILNPYIINVTLAAKMCSQVLCQEQGVCIRKNWNSSDYLHLNPDNFAIQLEKGGKFTVRGKPTLEDLEQFSEKFYCSCYSTLSCKEKADVKDTDAVDVCIADGVCIDAFLKPPMETEEPQIFYNASPSTLSATMFIVSILFLIIS

SEQ ID NO: 138 - protein, 502 aa, Homo sapiens
  PH20 precursor 1-502
MGVLKFKHIFFRSFVKSSGVSQIVFTFLLIPCCLTLNFRAPPVIPNVPFLWAWNAPSEFCLGKFDEPLDMSLFSFIGSPRINATGQGVTIFYVDRLGYYPYIDSITGVTVNGGIPQKISLQDHLDKAKKDITFYMPVDNLGMAVIDWEEWRPTWARNWKPKDVYKNRSIELVQQQNVQLSLTEATEKAKQEFEKAGKDFLVETIKLGKLLRPNHLWGYYLFPDCYNHHYKKPGYNGSCFNVEIKRNDDLSWLWNESTALYPSIYLNTQQSPVAATLYVRNRVREAIRVSKIPDAKSPLPVFAYTRIVFTDQVLKFLSQDELVYTFGETVALGASGIVIWGTLSIMRSMKSCLLLDNYMETILNPYIINVTLAAKMCSQVLCQEQGVCIRKNWNSSDYLHLNPDNFAIQLEKGGKFTVRGKPTLEDLEQFSEKFYCSCYSTLSCKEKADVKDTDAVDVCIADGVCIDAFLKPPMETEEPQIFYNASPSTLSATMFIVSILFLI

SEQ ID NO: 139 - protein, 500 aa, Homo sapiens
  PH20 precursor 1-500
MGVLKFKHIFFRSFVKSSGVSQIVFTFLLIPCCLTLNFRAPPVIPNVPFLWAWNAPSEFCLGKFDEPLDMSLFSFIGSPRINATGQGVTIFYVDRLGYYPYIDSITGVTVNGGIPQKISLQDHLDKAKKDITFYMPVDNLGMAVIDWEEWRPTWARNWKPKDVYKNRSIELVQQQNVQLSLTEATEKAKQEFEKAGKDFLVETIKLGKLLRPNHLWGYYLFPDCYNHHYKKPGYNGSCFNVEIKRNDDLSWLWNESTALYPSIYLNTQQSPVAATLYVRNRVREAIRVSKIPDAKSPLPVFAYTRIVFTDQVLKFLSQDELVYTFGETVALGASGIVIWGTLSIMRSMKSCLLLDNYMETILNPYIINVTLAAKMCSQVLCQEQGVCIRKNWNSSDYLHLNPDNFAIQLEKGGKFTVRGKPTLEDLEQFSEKFYCSCYSTLSCKEKADVKDTDAVDVCIADGVCIDAFLKPPMETEEPQIFYNASPSTLSATMFIVSILF

SEQ ID NO: 140 - protein, 498 aa, Homo sapiens
  PH20 precursor 1-498
MGVLKFKHIFFRSFVKSSGVSQIVFTFLLIPCCLTLNFRAPPVIPNVPFLWAWNAPSEFCLGKFDEPLDMSLFSFIGSPRINATGQGVTIFYVDRLGYYPYIDSITGVTVNGGIPQKISLQDHLDKAKKDITFYMPVDNLGMAVIDWEEWRPTWARNWKPKDVYKNRSIELVQQQNVQLSLTEATEKAKQEFEKAGKDFLVETIKLGKLLRPNHLWGYYLFPDCYNHHYKKPGYNGSCFNVEIKRNDDLSWLWNESTALYPSIYLNTQQSPVAATLYVRNRVREAIRVSKIPDAKSPLPVFAYTRIVFTDQVLKFLSQDELVYTFGETVALGASGIVIWGTLSIMRSMKSCLLLDNYMETILNPYIINVTLAAKMCSQVLCQEQGVCIRKNWNSSDYLHLNPDNFAIQLEKGGKFTVRGKPTLEDLEQFSEKFYCSCYSTLSCKEKADVKDTDAVDVCIADGVCIDAFLKPPMETEEPQIFYNASPSTLSATMFIVSI

SEQ ID NO: 141 - protein, 496 aa, Homo sapiens
  PH20 precursor 1-496
MGVLKFKHIFFRSFVKSSGVSQIVFTFLLIPCCLTLNFRAPPVIPNVPFLWAWNAPSEFCLGKFDEPLDMSLFSFIGSPRINATGQGVTIFYVDRLGYYPYIDSITGVTVNGGIPQKISLQDHLDKAKKDITFYMPVDNLGMAVIDWEEWRPTWARNWKPKDVYKNRSIELVQQQNVQLSLTEATEKAKQEFEKAGKDFLVETIKLGKLLRPNHLWGYYLFPDCYNHHYKKPGYNGSCFNVEIKRNDDLSWLWNESTALYPSIYLNTQQSPVAATLYVRNRVREAIRVSKIPDAKSPLPVFAYTRIVFTDQVLKFLSQDELVYTFGETVALGASGIVIWGTLSIMRSMKSCLLLDNYMETILNPYIINVTLAAKMCSQVLCQEQGVCIRKNWNSSDYLHLNPDNFAIQLEKGGKFTVRGKPTLEDLEQFSEKFYCSCYSTLSCKEKADVKDTDAVDVCIADGVCIDAFLKPPMETEEPQIFYNASPSTLSATMFIV

SEQ ID NO: 142 - protein, 494 aa, Homo sapiens
  PH20 precursor 1-494
MGVLKFKHIFFRSFVKSSGVSQIVFTFLLIPCCLTLNFRAPPVIPNVPFLWAWNAPSEFCLGKFDEPLDMSLFSFIGSPRINATGQGVTIFYVDRLGYYPYIDSITGVTVNGGIPQKISLQDHLDKAKKDITFYMPVDNLGMAVIDWEEWRPTWARNWKPKDVYKNRSIELVQQQNVQLSLTEATEKAKQEFEKAGKDFLVETIKLGKLLRPNHLWGYYLFPDCYNHHYKKPGYNGSCFNVEIKRNDDLSWLWNESTALYPSIYLNTQQSPVAATLYVRNRVREAIRVSKIPDAKSPLPVFAYTRIVFTDQVLKFLSQDELVYTFGETVALGASGIVIWGTLSIMRSMKSCLLLDNYMETILNPYIINVTLAAKMCSQVLCQEQGVCIRKNWNSSDYLHLNPDNFAIQLEKGGKFTVRGKPTLEDLEQFSEKFYCSCYSTLSCKEKADVKDTDAVDVCIADGVCIDAFLKPPMETEEPQIFYNASPSTLSATMF

SEQ ID NO: 143 - protein, 492 aa, Homo sapiens
  PH20 precursor 1-492
MGVLKFKHIFFRSFVKSSGVSQIVFTFLLIPCCLTLNFRAPPVIPNVPFLWAWNAPSEFCLGKFDEPLDMSLFSFIGSPRINATGQGVTIFYVDRLGYYPYIDSITGVTVNGGIPQKISLQDHLDKAKKDITFYMPVDNLGMAVIDWEEWRPTWARNWKPKDVYKNRSIELVQQQNVQLSLTEATEKAKQEFEKAGKDFLVETIKLGKLLRPNHLWGYYLFPDCYNHHYKKPGYNGSCFNVEIKRNDDLSWLWNESTALYPSIYLNTQQSPVAATLYVRNRVREAIRVSKIPDAKSPLPVFAYTRIVFTDQVLKFLSQDELVYTFGETVALGASGIVIWGTLSIMRSMKSCLLLDNYMETILNPYIINVTLAAKMCSQVLCQEQGVCIRKNWNSSDYLHLNPDNFAIQLEKGGKFTVRGKPTLEDLEQFSEKFYCSCYSTLSCKEKADVKDTDAVDVCIADGVCIDAFLKPPMETEEPQIFYNASPSTLSAT

SEQ ID NO: 144 - protein, 488 aa, Homo sapiens
  PH20 precursor 1-488
MGVLKFKHIFFRSFVKSSGVSQIVFTFLLIPCCLTLNFRAPPVIPNVPFLWAWNAPSEFCLGKFDEPLDMSLFSFIGSPRINATGQGVTIFYVDRLGYYPYIDSITGVTVNGGIPQKISLQDHLDKAKKDITFYMPVDNLGMAVIDWEEWRPTWARNWKPKDVYKNRSIELVQQQNVQLSLTEATEKAKQEFEKAGKDFLVETIKLGKLLRPNHLWGYYLFPDCYNHHYKKPGYNGSCFNVEIKRNDDLSWLWNESTALYPSIYLNTQQSPVAATLYVRNRVREAIRVSKIPDAKSPLPVFAYTRIVFTDQVLKFLSQDELVYTFGETVALGASGIVIWGTLSIMRSMKSCLLLDNYMETILNPYIINVTLAAKMCSQVLCQEQGVCIRKNWNSSDYLHLNPDNFAIQLEKGGKFTVRGKPTLEDLEQFSEKFYCSCYSTLSCKEKADVKDTDAVDVCIADGVCIDAFLKPPMETEEPQIFYNASPST

SEQ ID NO: 145 - protein, 486 aa, Homo sapiens
  PH20 precursor 1-486
MGVLKFKHIFFRSFVKSSGVSQIVFTFLLIPCCLTLNFRAPPVIPNVPFLWAWNAPSEFCLGKFDEPLDMSLFSFIGSPRINATGQGVTIFYVDRLGYYPYIDSITGVTVNGGIPQKISLQDHLDKAKKDITFYMPVDNLGMAVIDWEEWRPTWARNWKPKDVYKNRSIELVQQQNVQLSLTEATEKAKQEFEKAGKDFLVETIKLGKLLRPNHLWGYYLFPDCYNHHYKKPGYNGSCFNVEIKRNDDLSWLWNESTALYPSIYLNTQQSPVAATLYVRNRVREAIRVSKIPDAKSPLPVFAYTRIVFTDQVLKFLSQDELVYTFGETVALGASGIVIWGTLSIMRSMKSCLLLDNYMETILNPYIINVTLAAKMCSQVLCQEQGVCIRKNWNSSDYLHLNPDNFAIQLEKGGKFTVRGKPTLEDLEQFSEKFYCSCYSTLSCKEKADVKDTDAVDVCIADGVCIDAFLKPPMETEEPQIFYNASP

SEQ ID NO: 146 - protein, 472 aa, Homo sapiens
  mature PH20 36-507
LNFRAPPVIPNVPFLWAWNAPSEFCLGKFDEPLDMSLFSFIGSPRINATGQGVTIFYVDRLGYYPYIDSITGVTVNGGIPQKISLQDHLDKAKKDITFYMPVDNLGMAVIDWEEWRPTWARNWKPKDVYKNRSIELVQQQNVQLSLTEATEKAKQEFEKAGKDFLVETIKLGKLLRPNHLWGYYLFPDCYNHHYKKPGYNGSCFNVEIKRNDDLSWLWNESTALYPSIYLNTQQSPVAATLYVRNRVREAIRVSKIPDAKSPLPVFAYTRIVFTDQVLKFLSQDELVYTFGETVALGASGIVIWGTLSIMRSMKSCLLLDNYMETILNPYIINVTLAAKMCSQVLCQEQGVCIRKNWNSSDYLHLNPDNFAIQLEKGGKFTVRGKPTLEDLEQFSEKFYCSCYSTLSCKEKADVKDTDAVDVCIADGVCIDAFLKPPMETEEPQIFYNASPSTLSATMFIVSILFLIISSVA

SEQ ID NO: 147 - protein, 470 aa, Homo sapiens
  mature PH20 36-505
LNFRAPPVIPNVPFLWAWNAPSEFCLGKFDEPLDMSLFSFIGSPRINATGQGVTIFYVDRLGYYPYIDSITGVTVNGGIPQKISLQDHLDKAKKDITFYMPVDNLGMAVIDWEEWRPTWARNWKPKDVYKNRSIELVQQQNVQLSLTEATEKAKQEFEKAGKDFLVETIKLGKLLRPNHLWGYYLFPDCYNHHYKKPGYNGSCFNVEIKRNDDLSWLWNESTALYPSIYLNTQQSPVAATLYVRNRVREAIRVSKIPDAKSPLPVFAYTRIVFTDQVLKFLSQDELVYTFGETVALGASGIVIWGTLSIMRSMKSCLLLDNYMETILNPYIINVTLAAKMCSQVLCQEQGVCIRKNWNSSDYLHLNPDNFAIQLEKGGKFTVRGKPTLEDLEQFSEKFYCSCYSTLSCKEKADVKDTDAVDVCIADGVCIDAFLKPPMETEEPQIFYNASPSTLSATMFIVSILFLIISS

SEQ ID NO: 148 - protein, 468 aa, Homo sapiens
  mature PH20 36-503
LNFRAPPVIPNVPFLWAWNAPSEFCLGKFDEPLDMSLFSFIGSPRINATGQGVTIFYVDRLGYYPYIDSITGVTVNGGIPQKISLQDHLDKAKKDITFYMPVDNLGMAVIDWEEWRPTWARNWKPKDVYKNRSIELVQQQNVQLSLTEATEKAKQEFEKAGKDFLVETIKLGKLLRPNHLWGYYLFPDCYNHHYKKPGYNGSCFNVEIKRNDDLSWLWNESTALYPSIYLNTQQSPVAATLYVRNRVREAIRVSKIPDAKSPLPVFAYTRIVFTDQVLKFLSQDELVYTFGETVALGASGIVIWGTLSIMRSMKSCLLLDNYMETILNPYIINVTLAAKMCSQVLCQEQGVCIRKNWNSSDYLHLNPDNFAIQLEKGGKFTVRGKPTLEDLEQFSEKFYCSCYSTLSCKEKADVKDTDAVDVCIADGVCIDAFLKPPMETEEPQIFYNASPSTLSATMFIVSILFLII

SEQ ID NO: 149 - protein, 466 aa, Homo sapiens
  mature PH20 36-501
LNFRAPPVIPNVPFLWAWNAPSEFCLGKFDEPLDMSLFSFIGSPRINATGQGVTIFYVDRLGYYPYIDSITGVTVNGGIPQKISLQDHLDKAKKDITFYMPVDNLGMAVIDWEEWRPTWARNWKPKDVYKNRSIELVQQQNVQLSLTEATEKAKQEFEKAGKDFLVETIKLGKLLRPNHLWGYYLFPDCYNHHYKKPGYNGSCFNVEIKRNDDLSWLWNESTALYPSIYLNTQQSPVAATLYVRNRVREAIRVSKIPDAKSPLPVFAYTRIVFTDQVLKFLSQDELVYTFGETVALGASGIVIWGTLSIMRSMKSCLLLDNYMETILNPYIINVTLAAKMCSQVLCQEQGVCIRKNWNSSDYLHLNPDNFAIQLEKGGKFTVRGKPTLEDLEQFSEKFYCSCYSTLSCKEKADVKDTDAVDVCIADGVCIDAFLKPPMETEEPQIFYNASPSTLSATMFIVSILFL

SEQ ID NO: 150 - protein, 464 aa, Homo sapiens
  mature PH20 36-499
LNFRAPPVIPNVPFLWAWNAPSEFCLGKFDEPLDMSLFSFIGSPRINATGQGVTIFYVDRLGYYPYIDSITGVTVNGGIPQKISLQDHLDKAKKDITFYMPVDNLGMAVIDWEEWRPTWARNWKPKDVYKNRSIELVQQQNVQLSLTEATEKAKQEFEKAGKDFLVETIKLGKLLRPNHLWGYYLFPDCYNHHYKKPGYNGSCFNVEIKRNDDLSWLWNESTALYPSIYLNTQQSPVAATLYVRNRVREAIRVSKIPDAKSPLPVFAYTRIVFTDQVLKFLSQDELVYTFGETVALGASGIVIWGTLSIMRSMKSCLLLDNYMETILNPYIINVTLAAKMCSQVLCQEQGVCIRKNWNSSDYLHLNPDNFAIQLEKGGKFTVRGKPTLEDLEQFSEKFYCSCYSTLSCKEKADVKDTDAVDVCIADGVCIDAFLKPPMETEEPQIFYNASPSTLSATMFIVSIL

SEQ ID NO: 151 - protein, 462 aa, Homo sapiens
  PH20 36-497
LNFRAPPVIPNVPFLWAWNAPSEFCLGKFDEPLDMSLFSFIGSPRINATGQGVTIFYVDRLGYYPYIDSITGVTVNGGIPQKISLQDHLDKAKKDITFYMPVDNLGMAVIDWEEWRPTWARNWKPKDVYKNRSIELVQQQNVQLSLTEATEKAKQEFEKAGKDFLVETIKLGKLLRPNHLWGYYLFPDCYNHHYKKPGYNGSCFNVEIKRNDDLSWLWNESTALYPSIYLNTQQSPVAATLYVRNRVREAIRVSKIPDAKSPLPVFAYTRIVFTDQVLKFLSQDELVYTFGETVALGASGIVIWGTLSIMRSMKSCLLLDNYMETILNPYIINVTLAAKMCSQVLCQEQGVCIRKNWNSSDYLHLNPDNFAIQLEKGGKFTVRGKPTLEDLEQFSEKFYCSCYSTLSCKEKADVKDTDAVDVCIADGVCIDAFLKPPMETEEPQIFYNASPSTLSATMFIVS

SEQ ID NO: 152 - protein, 460 aa, Homo sapiens
  PH20 36-495
LNFRAPPVIPNVPFLWAWNAPSEFCLGKFDEPLDMSLFSFIGSPRINATGQGVTIFYVDRLGYYPYIDSITGVTVNGGIPQKISLQDHLDKAKKDITFYMPVDNLGMAVIDWEEWRPTWARNWKPKDVYKNRSIELVQQQNVQLSLTEATEKAKQEFEKAGKDFLVETIKLGKLLRPNHLWGYYLFPDCYNHHYKKPGYNGSCFNVEIKRNDDLSWLWNESTALYPSIYLNTQQSPVAATLYVRNRVREAIRVSKIPDAKSPLPVFAYTRIVFTDQVLKFLSQDELVYTFGETVALGASGIVIWGTLSIMRSMKSCLLLDNYMETILNPYIINVTLAAKMCSQVLCQEQGVCIRKNWNSSDYLHLNPDNFAIQLEKGGKFTVRGKPTLEDLEQFSEKFYCSCYSTLSCKEKADVKDTDAVDVCIADGVCIDAFLKPPMETEEPQIFYNASPSTLSATMFI

SEQ ID NO: 153 - protein, 458 aa, Homo sapiens
  PH20 36-493
LNFRAPPVIPNVPFLWAWNAPSEFCLGKFDEPLDMSLFSFIGSPRINATGQGVTIFYVDRLGYYPYIDSITGVTVNGGIPQKISLQDHLDKAKKDITFYMPVDNLGMAVIDWEEWRPTWARNWKPKDVYKNRSIELVQQQNVQLSLTEATEKAKQEFEKAGKDFLVETIKLGKLLRPNHLWGYYLFPDCYNHHYKKPGYNGSCFNVEIKRNDDLSWLWNESTALYPSIYLNTQQSPVAATLYVRNRVREAIRVSKIPDAKSPLPVFAYTRIVFTDQVLKFLSQDELVYTFGETVALGASGIVIWGTLSIMRSMKSCLLLDNYMETILNPYIINVTLAAKMCSQVLCQEQGVCIRKNWNSSDYLHLNPDNFAIQLEKGGKFTVRGKPTLEDLEQFSEKFYCSCYSTLSCKEKADVKDTDAVDVCIADGVCIDAFLKPPMETEEPQIFYNASPSTLSATM

SEQ ID NO: 154 - protein, 456 aa, Homo sapiens
  PH20 36-491
LNFRAPPVIPNVPFLWAWNAPSEFCLGKFDEPLDMSLFSFIGSPRINATGQGVTIFYVDRLGYYPYIDSITGVTVNGGIPQKISLQDHLDKAKKDITFYMPVDNLGMAVIDWEEWRPTWARNWKPKDVYKNRSIELVQQQNVQLSLTEATEKAKQEFEKAGKDFLVETIKLGKLLRPNHLWGYYLFPDCYNHHYKKPGYNGSCFNVEIKRNDDLSWLWNESTALYPSIYLNTQQSPVAATLYVRNRVREAIRVSKIPDAKSPLPVFAYTRIVFTDQVLKFLSQDELVYTFGETVALGASGIVIWGTLSIMRSMKSCLLLDNYMETILNPYIINVTLAAKMCSQVLCQEQGVCIRKNWNSSDYLHLNPDNFAIQLEKGGKFTVRGKPTLEDLEQFSEKFYCSCYSTLSCKEKADVKDTDAVDVCIADGVCIDAFLKPPMETEEPQIFYNASPSTLSA

SEQ ID NO: 155 - protein, 454 aa, Homo sapiens
  PH20 36-489
LNFRAPPVIPNVPFLWAWNAPSEFCLGKFDEPLDMSLFSFIGSPRINATGQGVTIFYVDRLGYYPYIDSITGVTVNGGIPQKISLQDHLDKAKKDITFYMPVDNLGMAVIDWEEWRPTWARNWKPKDVYKNRSIELVQQQNVQLSLTEATEKAKQEFEKAGKDFLVETIKLGKLLRPNHLWGYYLFPDCYNHHYKKPGYNGSCFNVEIKRNDDLSWLWNESTALYPSIYLNTQQSPVAATLYVRNRVREAIRVSKIPDAKSPLPVFAYTRIVFTDQVLKFLSQDELVYTFGETVALGASGIVIWGTLSIMRSMKSCLLLDNYMETILNPYIINVTLAAKMCSQVLCQEQGVCIRKNWNSSDYLHLNPDNFAIQLEKGGKFTVRGKPTLEDLEQFSEKFYCSCYSTLSCKEKADVKDTDAVDVCIADGVCIDAFLKPPMETEEPQIFYNASPSTL

SEQ ID NO: 156 - protein, 455 aa, Homo sapiens
  PH20 36-490
LNFRAPPVIPNVPFLWAWNAPSEFCLGKFDEPLDMSLFSFIGSPRINATGQGVTIFYVDRLGYYPYIDSITGVTVNGGIPQKISLQDHLDKAKKDITFYMPVDNLGMAVIDWEEWRPTWARNWKPKDVYKNRSIELVQQQNVQLSLTEATEKAKQEFEKAGKDFLVETIKLGKLLRPNHLWGYYLFPDCYNHHYKKPGYNGSCFNVEIKRNDDLSWLWNESTALYPSIYLNTQQSPVAATLYVRNRVREAIRVSKIPDAKSPLPVFAYTRIVFTDQVLKFLSQDELVYTFGETVALGASGIVIWGTLSIMRSMKSCLLLDNYMETILNPYIINVTLAAKMCSQVLCQEQGVCIRKNWNSSDYLHLNPDNFAIQLEKGGKFTVRGKPTLEDLEQFSEKFYCSCYSTLSCKEKADVKDTDAVDVCIADGVCIDAFLKPPMETEEPQIFYNASPSTLS

SEQ ID NO: 157 - protein, 452 aa, Homo sapiens
  PH20 36-487
LNFRAPPVIPNVPFLWAWNAPSEFCLGKFDEPLDMSLFSFIGSPRINATGQGVTIFYVDRLGYYPYIDSITGVTVNGGIPQKISLQDHLDKAKKDITFYMPVDNLGMAVIDWEEWRPTWARNWKPKDVYKNRSIELVQQQNVQLSLTEATEKAKQEFEKAGKDFLVETIKLGKLLRPNHLWGYYLFPDCYNHHYKKPGYNGSCFNVEIKRNDDLSWLWNESTALYPSIYLNTQQSPVAATLYVRNRVREAIRVSKIPDAKSPLPVFAYTRIVFTDQVLKFLSQDELVYTFGETVALGASGIVIWGTLSIMRSMKSCLLLDNYMETILNPYIINVTLAAKMCSQVLCQEQGVCIRKNWNSSDYLHLNPDNFAIQLEKGGKFTVRGKPTLEDLEQFSEKFYCSCYSTLSCKEKADVKDTDAVDVCIADGVCIDAFLKPPMETEEPQIFYNASPS

SEQ ID NO: 158 - protein, 450 aa, Homo sapiens
  PH20 36-485
LNFRAPPVIPNVPFLWAWNAPSEFCLGKFDEPLDMSLFSFIGSPRINATGQGVTIFYVDRLGYYPYIDSITGVTVNGGIPQKISLQDHLDKAKKDITFYMPVDNLGMAVIDWEEWRPTWARNWKPKDVYKNRSIELVQQQNVQLSLTEATEKAKQEFEKAGKDFLVETIKLGKLLRPNHLWGYYLFPDCYNHHYKKPGYNGSCFNVEIKRNDDLSWLWNESTALYPSIYLNTQQSPVAATLYVRNRVREAIRVSKIPDAKSPLPVFAYTRIVFTDQVLKFLSQDELVYTFGETVALGASGIVIWGTLSIMRSMKSCLLLDNYMETILNPYIINVTLAAKMCSQVLCQEQGVCIRKNWNSSDYLHLNPDNFAIQLEKGGKFTVRGKPTLEDLEQFSEKFYCSCYSTLSCKEKADVKDTDAVDVCIADGVCIDAFLKPPMETEEPQIFYNAS

SEQ ID NO: 159 - protein, 449 aa, Homo sapiens
  PH20 36-484
LNFRAPPVIPNVPFLWAWNAPSEFCLGKFDEPLDMSLFSFIGSPRINATGQGVTIFYVDRLGYYPYIDSITGVTVNGGIPQKISLQDHLDKAKKDITFYMPVDNLGMAVIDWEEWRPTWARNWKPKDVYKNRSIELVQQQNVQLSLTEATEKAKQEFEKAGKDFLVETIKLGKLLRPNHLWGYYLFPDCYNHHYKKPGYNGSCFNVEIKRNDDLSWLWNESTALYPSIYLNTQQSPVAATLYVRNRVREAIRVSKIPDAKSPLPVFAYTRIVFTDQVLKFLSQDELVYTFGETVALGASGIVIWGTLSIMRSMKSCLLLDNYMETILNPYIINVTLAAKMCSQVLCQEQGVCIRKNWNSSDYLHLNPDNFAIQLEKGGKFTVRGKPTLEDLEQFSEKFYCSCYSTLSCKEKADVKDTDAVDVCIADGVCIDAFLKPPMETEEPQIFYNA

SEQ ID NO: 160 - protein, 441 aa, Homo sapiens
  PH20 36-476
LNFRAPPVIPNVPFLWAWNAPSEFCLGKFDEPLDMSLFSFIGSPRINATGQGVTIFYVDRLGYYPYIDSITGVTVNGGIPQKISLQDHLDKAKKDITFYMPVDNLGMAVIDWEEWRPTWARNWKPKDVYKNRSIELVQQQNVQLSLTEATEKAKQEFEKAGKDFLVETIKLGKLLRPNHLWGYYLFPDCYNHHYKKPGYNGSCFNVEIKRNDDLSWLWNESTALYPSIYLNTQQSPVAATLYVRNRVREAIRVSKIPDAKSPLPVFAYTRIVFTDQVLKFLSQDELVYTFGETVALGASGIVIWGTLSIMRSMKSCLLLDNYMETILNPYIINVTLAAKMCSQVLCQEQGVCIRKNWNSSDYLHLNPDNFAIQLEKGGKFTVRGKPTLEDLEQFSEKFYCSCYSTLSCKEKADVKDTDAVDVCIADGVCIDAFLKPPMETE

SEQ ID NO: 161 - protein, 440 aa, Homo sapiens
  PH20 36-475
LNFRAPPVIPNVPFLWAWNAPSEFCLGKFDEPLDMSLFSFIGSPRINATGQGVTIFYVDRLGYYPYIDSITGVTVNGGIPQKISLQDHLDKAKKDITFYMPVDNLGMAVIDWEEWRPTWARNWKPKDVYKNRSIELVQQQNVQLSLTEATEKAKQEFEKAGKDFLVETIKLGKLLRPNHLWGYYLFPDCYNHHYKKPGYNGSCFNVEIKRNDDLSWLWNESTALYPSIYLNTQQSPVAATLYVRNRVREAIRVSKIPDAKSPLPVFAYTRIVFTDQVLKFLSQDELVYTFGETVALGASGIVIWGTLSIMRSMKSCLLLDNYMETILNPYIINVTLAAKMCSQVLCQEQGVCIRKNWNSSDYLHLNPDNFAIQLEKGGKFTVRGKPTLEDLEQFSEKFYCSCYSTLSCKEKADVKDTDAVDVCIADGVCIDAFLKPPMET

SEQ ID NO: 162 - protein, 439 aa, Homo sapiens
  PH20 36-474
LNFRAPPVIPNVPFLWAWNAPSEFCLGKFDEPLDMSLFSFIGSPRINATGQGVTIFYVDRLGYYPYIDSITGVTVNGGIPQKISLQDHLDKAKKDITFYMPVDNLGMAVIDWEEWRPTWARNWKPKDVYKNRSIELVQQQNVQLSLTEATEKAKQEFEKAGKDFLVETIKLGKLLRPNHLWGYYLFPDCYNHHYKKPGYNGSCFNVEIKRNDDLSWLWNESTALYPSIYLNTQQSPVAATLYVRNRVREAIRVSKIPDAKSPLPVFAYTRIVFTDQVLKFLSQDELVYTFGETVALGASGIVIWGTLSIMRSMKSCLLLDNYMETILNPYIINVTLAAKMCSQVLCQEQGVCIRKNWNSSDYLHLNPDNFAIQLEKGGKFTVRGKPTLEDLEQFSEKFYCSCYSTLSCKEKADVKDTDAVDVCIADGVCIDAFLKPPME

SEQ ID NO: 163 - protein, 438 aa, Homo sapiens
  PH20 36-473
LNFRAPPVIPNVPFLWAWNAPSEFCLGKFDEPLDMSLFSFIGSPRINATGQGVTIFYVDRLGYYPYIDSITGVTVNGGIPQKISLQDHLDKAKKDITFYMPVDNLGMAVIDWEEWRPTWARNWKPKDVYKNRSIELVQQQNVQLSLTEATEKAKQEFEKAGKDFLVETIKLGKLLRPNHLWGYYLFPDCYNHHYKKPGYNGSCFNVEIKRNDDLSWLWNESTALYPSIYLNTQQSPVAATLYVRNRVREAIRVSKIPDAKSPLPVFAYTRIVFTDQVLKFLSQDELVYTFGETVALGASGIVIWGTLSIMRSMKSCLLLDNYMETILNPYIINVTLAAKMCSQVLCQEQGVCIRKNWNSSDYLHLNPDNFAIQLEKGGKFTVRGKPTLEDLEQFSEKFYCSCYSTLSCKEKADVKDTDAVDVCIADGVCIDAFLKPPM

SEQ ID NO: 164 - protein, 437 aa, Homo sapiens
  PH20 36-472
LNFRAPPVIPNVPFLWAWNAPSEFCLGKFDEPLDMSLFSFIGSPRINATGQGVTIFYVDRLGYYPYIDSITGVTVNGGIPQKISLQDHLDKAKKDITFYMPVDNLGMAVIDWEEWRPTWARNWKPKDVYKNRSIELVQQQNVQLSLTEATEKAKQEFEKAGKDFLVETIKLGKLLRPNHLWGYYLFPDCYNHHYKKPGYNGSCFNVEIKRNDDLSWLWNESTALYPSIYLNTQQSPVAATLYVRNRVREAIRVSKIPDAKSPLPVFAYTRIVFTDQVLKFLSQDELVYTFGETVALGASGIVIWGTLSIMRSMKSCLLLDNYMETILNPYIINVTLAAKMCSQVLCQEQGVCIRKNWNSSDYLHLNPDNFAIQLEKGGKFTVRGKPTLEDLEQFSEKFYCSCYSTLSCKEKADVKDTDAVDVCIADGVCIDAFLKPP

SEQ ID NO: 165 - protein, 436 aa, Homo sapiens
  PH20 36-471
LNFRAPPVIPNVPFLWAWNAPSEFCLGKFDEPLDMSLFSFIGSPRINATGQGVTIFYVDRLGYYPYIDSITGVTVNGGIPQKISLQDHLDKAKKDITFYMPVDNLGMAVIDWEEWRPTWARNWKPKDVYKNRSIELVQQQNVQLSLTEATEKAKQEFEKAGKDFLVETIKLGKLLRPNHLWGYYLFPDCYNHHYKKPGYNGSCFNVEIKRNDDLSWLWNESTALYPSIYLNTQQSPVAATLYVRNRVREAIRVSKIPDAKSPLPVFAYTRIVFTDQVLKFLSQDELVYTFGETVALGASGIVIWGTLSIMRSMKSCLLLDNYMETILNPYIINVTLAAKMCSQVLCQEQGVCIRKNWNSSDYLHLNPDNFAIQLEKGGKFTVRGKPTLEDLEQFSEKFYCSCYSTLSCKEKADVKDTDAVDVCIADGVCIDAFLKP

SEQ ID NO: 166 - protein, 435 aa, Homo sapiens
  PH20 36-470
LNFRAPPVIPNVPFLWAWNAPSEFCLGKFDEPLDMSLFSFIGSPRINATGQGVTIFYVDRLGYYPYIDSITGVTVNGGIPQKISLQDHLDKAKKDITFYMPVDNLGMAVIDWEEWRPTWARNWKPKDVYKNRSIELVQQQNVQLSLTEATEKAKQEFEKAGKDFLVETIKLGKLLRPNHLWGYYLFPDCYNHHYKKPGYNGSCFNVEIKRNDDLSWLWNESTALYPSIYLNTQQSPVAATLYVRNRVREAIRVSKIPDAKSPLPVFAYTRIVFTDQVLKFLSQDELVYTFGETVALGASGIVIWGTLSIMRSMKSCLLLDNYMETILNPYIINVTLAAKMCSQVLCQEQGVCIRKNWNSSDYLHLNPDNFAIQLEKGGKFTVRGKPTLEDLEQFSEKFYCSCYSTLSCKEKADVKDTDAVDVCIADGVCIDAFLK

SEQ ID NO: 167 - protein, 434 aa, Homo sapiens
  PH20 36-469
LNFRAPPVIPNVPFLWAWNAPSEFCLGKFDEPLDMSLFSFIGSPRINATGQGVTIFYVDRLGYYPYIDSITGVTVNGGIPQKISLQDHLDKAKKDITFYMPVDNLGMAVIDWEEWRPTWARNWKPKDVYKNRSIELVQQQNVQLSLTEATEKAKQEFEKAGKDFLVETIKLGKLLRPNHLWGYYLFPDCYNHHYKKPGYNGSCFNVEIKRNDDLSWLWNESTALYPSIYLNTQQSPVAATLYVRNRVREAIRVSKIPDAKSPLPVFAYTRIVFTDQVLKFLSQDELVYTFGETVALGASGIVIWGTLSIMRSMKSCLLLDNYMETILNPYIINVTLAAKMCSQVLCQEQGVCIRKNWNSSDYLHLNPDNFAIQLEKGGKFTVRGKPTLEDLEQFSEKFYCSCYSTLSCKEKADVKDTDAVDVCIADGVCIDAFL

SEQ ID NO: 168 - protein, 433 aa, Homo sapiens
  PH20 36-468
LNFRAPPVIPNVPFLWAWNAPSEFCLGKFDEPLDMSLFSFIGSPRINATGQGVTIFYVDRLGYYPYIDSITGVTVNGGIPQKISLQDHLDKAKKDITFYMPVDNLGMAVIDWEEWRPTWARNWKPKDVYKNRSIELVQQQNVQLSLTEATEKAKQEFEKAGKDFLVETIKLGKLLRPNHLWGYYLFPDCYNHHYKKPGYNGSCFNVEIKRNDDLSWLWNESTALYPSIYLNTQQSPVAATLYVRNRVREAIRVSKIPDAKSPLPVFAYTRIVFTDQVLKFLSQDELVYTFGETVALGASGIVIWGTLSIMRSMKSCLLLDNYMETILNPYIINVTLAAKMCSQVLCQEQGVCIRKNWNSSDYLHLNPDNFAIQLEKGGKFTVRGKPTLEDLEQFSEKFYCSCYSTLSCKEKADVKDTDAVDVCIADGVCIDAF

SEQ ID NO: 169 - protein, 431 aa, Homo sapiens
  PH20 36-466
LNFRAPPVIPNVPFLWAWNAPSEFCLGKFDEPLDMSLFSFIGSPRINATGQGVTIFYVDRLGYYPYIDSITGVTVNGGIPQKISLQDHLDKAKKDITFYMPVDNLGMAVIDWEEWRPTWARNWKPKDVYKNRSIELVQQQNVQLSLTEATEKAKQEFEKAGKDFLVETIKLGKLLRPNHLWGYYLFPDCYNHHYKKPGYNGSCFNVEIKRNDDLSWLWNESTALYPSIYLNTQQSPVAATLYVRNRVREAIRVSKIPDAKSPLPVFAYTRIVFTDQVLKFLSQDELVYTFGETVALGASGIVIWGTLSIMRSMKSCLLLDNYMETILNPYIINVTLAAKMCSQVLCQEQGVCIRKNWNSSDYLHLNPDNFAIQLEKGGKFTVRGKPTLEDLEQFSEKFYCSCYSTLSCKEKADVKDTDAVDVCIADGVCID

SEQ ID NO: 170 - protein, 430 aa, Homo sapiens
  PH20 36-465
LNFRAPPVIPNVPFLWAWNAPSEFCLGKFDEPLDMSLFSFIGSPRINATGQGVTIFYVDRLGYYPYIDSITGVTVNGGIPQKISLQDHLDKAKKDITFYMPVDNLGMAVIDWEEWRPTWARNWKPKDVYKNRSIELVQQQNVQLSLTEATEKAKQEFEKAGKDFLVETIKLGKLLRPNHLWGYYLFPDCYNHHYKKPGYNGSCFNVEIKRNDDLSWLWNESTALYPSIYLNTQQSPVAATLYVRNRVREAIRVSKIPDAKSPLPVFAYTRIVFTDQVLKFLSQDELVYTFGETVALGASGIVIWGTLSIMRSMKSCLLLDNYMETILNPYIINVTLAAKMCSQVLCQEQGVCIRKNWNSSDYLHLNPDNFAIQLEKGGKFTVRGKPTLEDLEQFSEKFYCSCYSTLSCKEKADVKDTDAVDVCIADGVCI

SEQ ID NO: 171 - protein, 429 aa, Homo sapiens
  PH20 36-464
LNFRAPPVIPNVPFLWAWNAPSEFCLGKFDEPLDMSLFSFIGSPRINATGQGVTIFYVDRLGYYPYIDSITGVTVNGGIPQKISLQDHLDKAKKDITFYMPVDNLGMAVIDWEEWRPTWARNWKPKDVYKNRSIELVQQQNVQLSLTEATEKAKQEFEKAGKDFLVETIKLGKLLRPNHLWGYYLFPDCYNHHYKKPGYNGSCFNVEIKRNDDLSWLWNESTALYPSIYLNTQQSPVAATLYVRNRVREAIRVSKIPDAKSPLPVFAYTRIVFTDQVLKFLSQDELVYTFGETVALGASGIVIWGTLSIMRSMKSCLLLDNYMETILNPYIINVTLAAKMCSQVLCQEQGVCIRKNWNSSDYLHLNPDNFAIQLEKGGKFTVRGKPTLEDLEQFSEKFYCSCYSTLSCKEKADVKDTDAVDVCIADGVC

SEQ ID NO: 172 - protein, 427 aa, Homo sapiens
  PH20 36-462
LNFRAPPVIPNVPFLWAWNAPSEFCLGKFDEPLDMSLFSFIGSPRINATGQGVTIFYVDRLGYYPYIDSITGVTVNGGIPQKISLQDHLDKAKKDITFYMPVDNLGMAVIDWEEWRPTWARNWKPKDVYKNRSIELVQQQNVQLSLTEATEKAKQEFEKAGKDFLVETIKLGKLLRPNHLWGYYLFPDCYNHHYKKPGYNGSCFNVEIKRNDDLSWLWNESTALYPSIYLNTQQSPVAATLYVRNRVREAIRVSKIPDAKSPLPVFAYTRIVFTDQVLKFLSQDELVYTFGETVALGASGIVIWGTLSIMRSMKSCLLLDNYMETILNPYIINVTLAAKMCSQVLCQEQGVCIRKNWNSSDYLHLNPDNFAIQLEKGGKFTVRGKPTLEDLEQFSEKFYCSCYSTLSCKEKADVKDTDAVDVCIADG

SEQ ID NO: 173 - protein, 425 aa, Homo sapiens
  PH20 36-460
LNFRAPPVIPNVPFLWAWNAPSEFCLGKFDEPLDMSLFSFIGSPRINATGQGVTIFYVDRLGYYPYIDSITGVTVNGGIPQKISLQDHLDKAKKDITFYMPVDNLGMAVIDWEEWRPTWARNWKPKDVYKNRSIELVQQQNVQLSLTEATEKAKQEFEKAGKDFLVETIKLGKLLRPNHLWGYYLFPDCYNHHYKKPGYNGSCFNVEIKRNDDLSWLWNESTALYPSIYLNTQQSPVAATLYVRNRVREAIRVSKIPDAKSPLPVFAYTRIVFTDQVLKFLSQDELVYTFGETVALGASGIVIWGTLSIMRSMKSCLLLDNYMETILNPYIINVTLAAKMCSQVLCQEQGVCIRKNWNSSDYLHLNPDNFAIQLEKGGKFTVRGKPTLEDLEQFSEKFYCSCYSTLSCKEKADVKDTDAVDVCIA

SEQ ID NO: 174 - protein, 423 aa, Homo sapiens
  PH20 36-458
LNFRAPPVIPNVPFLWAWNAPSEFCLGKFDEPLDMSLFSFIGSPRINATGQGVTIFYVDRLGYYPYIDSITGVTVNGGIPQKISLQDHLDKAKKDITFYMPVDNLGMAVIDWEEWRPTWARNWKPKDVYKNRSIELVQQQNVQLSLTEATEKAKQEFEKAGKDFLVETIKLGKLLRPNHLWGYYLFPDCYNHHYKKPGYNGSCFNVEIKRNDDLSWLWNESTALYPSIYLNTQQSPVAATLYVRNRVREAIRVSKIPDAKSPLPVFAYTRIVFTDQVLKFLSQDELVYTFGETVALGASGIVIWGTLSIMRSMKSCLLLDNYMETILNPYIINVTLAAKMCSQVLCQEQGVCIRKNWNSSDYLHLNPDNFAIQLEKGGKFTVRGKPTLEDLEQFSEKFYCSCYSTLSCKEKADVKDTDAVDVC

SEQ ID NO: 175 - protein, 421 aa, Homo sapiens
  PH20 36-456
LNFRAPPVIPNVPFLWAWNAPSEFCLGKFDEPLDMSLFSFIGSPRINATGQGVTIFYVDRLGYYPYIDSITGVTVNGGIPQKISLQDHLDKAKKDITFYMPVDNLGMAVIDWEEWRPTWARNWKPKDVYKNRSIELVQQQNVQLSLTEATEKAKQEFEKAGKDFLVETIKLGKLLRPNHLWGYYLFPDCYNHHYKKPGYNGSCFNVEIKRNDDLSWLWNESTALYPSIYLNTQQSPVAATLYVRNRVREAIRVSKIPDAKSPLPVFAYTRIVFTDQVLKFLSQDELVYTFGETVALGASGIVIWGTLSIMRSMKSCLLLDNYMETILNPYIINVTLAAKMCSQVLCQEQGVCIRKNWNSSDYLHLNPDNFAIQLEKGGKFTVRGKPTLEDLEQFSEKFYCSCYSTLSCKEKADVKDTDAVD

SEQ ID NO: 176 - protein, 419 aa, Homo sapiens
  PH20 36-454
LNFRAPPVIPNVPFLWAWNAPSEFCLGKFDEPLDMSLFSFIGSPRINATGQGVTIFYVDRLGYYPYIDSITGVTVNGGIPQKISLQDHLDKAKKDITFYMPVDNLGMAVIDWEEWRPTWARNWKPKDVYKNRSIELVQQQNVQLSLTEATEKAKQEFEKAGKDFLVETIKLGKLLRPNHLWGYYLFPDCYNHHYKKPGYNGSCFNVEIKRNDDLSWLWNESTALYPSIYLNTQQSPVAATLYVRNRVREAIRVSKIPDAKSPLPVFAYTRIVFTDQVLKFLSQDELVYTFGETVALGASGIVIWGTLSIMRSMKSCLLLDNYMETILNPYIINVTLAAKMCSQVLCQEQGVCIRKNWNSSDYLHLNPDNFAIQLEKGGKFTVRGKPTLEDLEQFSEKFYCSCYSTLSCKEKADVKDTDA

SEQ ID NO: 177 - protein, 417 aa, Homo sapiens
  PH20 36-452
LNFRAPPVIPNVPFLWAWNAPSEFCLGKFDEPLDMSLFSFIGSPRINATGQGVTIFYVDRLGYYPYIDSITGVTVNGGIPQKISLQDHLDKAKKDITFYMPVDNLGMAVIDWEEWRPTWARNWKPKDVYKNRSIELVQQQNVQLSLTEATEKAKQEFEKAGKDFLVETIKLGKLLRPNHLWGYYLFPDCYNHHYKKPGYNGSCFNVEIKRNDDLSWLWNESTALYPSIYLNTQQSPVAATLYVRNRVREAIRVSKIPDAKSPLPVFAYTRIVFTDQVLKFLSQDELVYTFGETVALGASGIVIWGTLSIMRSMKSCLLLDNYMETILNPYIINVTLAAKMCSQVLCQEQGVCIRKNWNSSDYLHLNPDNFAIQLEKGGKFTVRGKPTLEDLEQFSEKFYCSCYSTLSCKEKADVKDT

SEQ ID NO: 178 - protein, 415 aa, Homo sapiens
  PH20 36-450
LNFRAPPVIPNVPFLWAWNAPSEFCLGKFDEPLDMSLFSFIGSPRINATGQGVTIFYVDRLGYYPYIDSITGVTVNGGIPQKISLQDHLDKAKKDITFYMPVDNLGMAVIDWEEWRPTWARNWKPKDVYKNRSIELVQQQNVQLSLTEATEKAKQEFEKAGKDFLVETIKLGKLLRPNHLWGYYLFPDCYNHHYKKPGYNGSCFNVEIKRNDDLSWLWNESTALYPSIYLNTQQSPVAATLYVRNRVREAIRVSKIPDAKSPLPVFAYTRIVFTDQVLKFLSQDELVYTFGETVALGASGIVIWGTLSIMRSMKSCLLLDNYMETILNPYIINVTLAAKMCSQVLCQEQGVCIRKNWNSSDYLHLNPDNFAIQLEKGGKFTVRGKPTLEDLEQFSEKFYCSCYSTLSCKEKADVK

SEQ ID NO: 179 - protein, 473 aa, Homo sapiens
  PH20 36-508
LNFRAPPVIPNVPFLWAWNAPSEFCLGKFDEPLDMSLFSFIGSPRINATGQGVTIFYVDRLGYYPYIDSITGVTVNGGIPQKISLQDHLDKAKKDITFYMPVDNLGMAVIDWEEWRPTWARNWKPKDVYKNRSIELVQQQNVQLSLTEATEKAKQEFEKAGKDFLVETIKLGKLLRPNHLWGYYLFPDCYNHHYKKPGYNGSCFNVEIKRNDDLSWLWNESTALYPSIYLNTQQSPVAATLYVRNRVREAIRVSKIPDAKSPLPVFAYTRIVFTDQVLKFLSQDELVYTFGETVALGASGIVIWGTLSIMRSMKSCLLLDNYMETILNPYIINVTLAAKMCSQVLCQEQGVCIRKNWNSSDYLHLNPDNFAIQLEKGGKFTVRGKPTLEDLEQFSEKFYCSCYSTLSCKEKADVKDTDAVDVCIADGVCIDAFLKPPMETEEPQIFYNASPSTLSATMFIVSILFLIISSVAS

SEQ ID NO: 180 - protein, 471 aa, Homo sapiens
  PH20 36-506
LNFRAPPVIPNVPFLWAWNAPSEFCLGKFDEPLDMSLFSFIGSPRINATGQGVTIFYVDRLGYYPYIDSITGVTVNGGIPQKISLQDHLDKAKKDITFYMPVDNLGMAVIDWEEWRPTWARNWKPKDVYKNRSIELVQQQNVQLSLTEATEKAKQEFEKAGKDFLVETIKLGKLLRPNHLWGYYLFPDCYNHHYKKPGYNGSCFNVEIKRNDDLSWLWNESTALYPSIYLNTQQSPVAATLYVRNRVREAIRVSKIPDAKSPLPVFAYTRIVFTDQVLKFLSQDELVYTFGETVALGASGIVIWGTLSIMRSMKSCLLLDNYMETILNPYIINVTLAAKMCSQVLCQEQGVCIRKNWNSSDYLHLNPDNFAIQLEKGGKFTVRGKPTLEDLEQFSEKFYCSCYSTLSCKEKADVKDTDAVDVCIADGVCIDAFLKPPMETEEPQIFYNASPSTLSATMFIVSILFLIISSV

SEQ ID NO: 181 - protein, 469 aa, Homo sapiens
  PH20 36-504
LNFRAPPVIPNVPFLWAWNAPSEFCLGKFDEPLDMSLFSFIGSPRINATGQGVTIFYVDRLGYYPYIDSITGVTVNGGIPQKISLQDHLDKAKKDITFYMPVDNLGMAVIDWEEWRPTWARNWKPKDVYKNRSIELVQQQNVQLSLTEATEKAKQEFEKAGKDFLVETIKLGKLLRPNHLWGYYLFPDCYNHHYKKPGYNGSCFNVEIKRNDDLSWLWNESTALYPSIYLNTQQSPVAATLYVRNRVREAIRVSKIPDAKSPLPVFAYTRIVFTDQVLKFLSQDELVYTFGETVALGASGIVIWGTLSIMRSMKSCLLLDNYMETILNPYIINVTLAAKMCSQVLCQEQGVCIRKNWNSSDYLHLNPDNFAIQLEKGGKFTVRGKPTLEDLEQFSEKFYCSCYSTLSCKEKADVKDTDAVDVCIADGVCIDAFLKPPMETEEPQIFYNASPSTLSATMFIVSILFLIIS

SEQ ID NO: 182 - protein, 467 aa, Homo sapiens
  PH20 36-502
LNFRAPPVIPNVPFLWAWNAPSEFCLGKFDEPLDMSLFSFIGSPRINATGQGVTIFYVDRLGYYPYIDSITGVTVNGGIPQKISLQDHLDKAKKDITFYMPVDNLGMAVIDWEEWRPTWARNWKPKDVYKNRSIELVQQQNVQLSLTEATEKAKQEFEKAGKDFLVETIKLGKLLRPNHLWGYYLFPDCYNHHYKKPGYNGSCFNVEIKRNDDLSWLWNESTALYPSIYLNTQQSPVAATLYVRNRVREAIRVSKIPDAKSPLPVFAYTRIVFTDQVLKFLSQDELVYTFGETVALGASGIVIWGTLSIMRSMKSCLLLDNYMETILNPYIINVTLAAKMCSQVLCQEQGVCIRKNWNSSDYLHLNPDNFAIQLEKGGKFTVRGKPTLEDLEQFSEKFYCSCYSTLSCKEKADVKDTDAVDVCIADGVCIDAFLKPPMETEEPQIFYNASPSTLSATMFIVSILFLI

SEQ ID NO: 183 - protein, 465 aa, Homo sapiens
  PH20 36-500
LNFRAPPVIPNVPFLWAWNAPSEFCLGKFDEPLDMSLFSFIGSPRINATGQGVTIFYVDRLGYYPYIDSITGVTVNGGIPQKISLQDHLDKAKKDITFYMPVDNLGMAVIDWEEWRPTWARNWKPKDVYKNRSIELVQQQNVQLSLTEATEKAKQEFEKAGKDFLVETIKLGKLLRPNHLWGYYLFPDCYNHHYKKPGYNGSCFNVEIKRNDDLSWLWNESTALYPSIYLNTQQSPVAATLYVRNRVREAIRVSKIPDAKSPLPVFAYTRIVFTDQVLKFLSQDELVYTFGETVALGASGIVIWGTLSIMRSMKSCLLLDNYMETILNPYIINVTLAAKMCSQVLCQEQGVCIRKNWNSSDYLHLNPDNFAIQLEKGGKFTVRGKPTLEDLEQFSEKFYCSCYSTLSCKEKADVKDTDAVDVCIADGVCIDAFLKPPMETEEPQIFYNASPSTLSATMFIVSILF

SEQ ID NO: 184 - protein, 463 aa, Homo sapiens
  PH20 36-498
LNFRAPPVIPNVPFLWAWNAPSEFCLGKFDEPLDMSLFSFIGSPRINATGQGVTIFYVDRLGYYPYIDSITGVTVNGGIPQKISLQDHLDKAKKDITFYMPVDNLGMAVIDWEEWRPTWARNWKPKDVYKNRSIELVQQQNVQLSLTEATEKAKQEFEKAGKDFLVETIKLGKLLRPNHLWGYYLFPDCYNHHYKKPGYNGSCFNVEIKRNDDLSWLWNESTALYPSIYLNTQQSPVAATLYVRNRVREAIRVSKIPDAKSPLPVFAYTRIVFTDQVLKFLSQDELVYTFGETVALGASGIVIWGTLSIMRSMKSCLLLDNYMETILNPYIINVTLAAKMCSQVLCQEQGVCIRKNWNSSDYLHLNPDNFAIQLEKGGKFTVRGKPTLEDLEQFSEKFYCSCYSTLSCKEKADVKDTDAVDVCIADGVCIDAFLKPPMETEEPQIFYNASPSTLSATMFIVSI

SEQ ID NO: 185 - protein, 461 aa, Homo sapiens
  PH20 36-496
LNFRAPPVIPNVPFLWAWNAPSEFCLGKFDEPLDMSLFSFIGSPRINATGQGVTIFYVDRLGYYPYIDSITGVTVNGGIPQKISLQDHLDKAKKDITFYMPVDNLGMAVIDWEEWRPTWARNWKPKDVYKNRSIELVQQQNVQLSLTEATEKAKQEFEKAGKDFLVETIKLGKLLRPNHLWGYYLFPDCYNHHYKKPGYNGSCFNVEIKRNDDLSWLWNESTALYPSIYLNTQQSPVAATLYVRNRVREAIRVSKIPDAKSPLPVFAYTRIVFTDQVLKFLSQDELVYTFGETVALGASGIVIWGTLSIMRSMKSCLLLDNYMETILNPYIINVTLAAKMCSQVLCQEQGVCIRKNWNSSDYLHLNPDNFAIQLEKGGKFTVRGKPTLEDLEQFSEKFYCSCYSTLSCKEKADVKDTDAVDVCIADGVCIDAFLKPPMETEEPQIFYNASPSTLSATMFIV

SEQ ID NO: 186 - protein, 459 aa, Homo sapiens
  PH20 36-494
LNFRAPPVIPNVPFLWAWNAPSEFCLGKFDEPLDMSLFSFIGSPRINATGQGVTIFYVDRLGYYPYIDSITGVTVNGGIPQKISLQDHLDKAKKDITFYMPVDNLGMAVIDWEEWRPTWARNWKPKDVYKNRSIELVQQQNVQLSLTEATEKAKQEFEKAGKDFLVETIKLGKLLRPNHLWGYYLFPDCYNHHYKKPGYNGSCFNVEIKRNDDLSWLWNESTALYPSIYLNTQQSPVAATLYVRNRVREAIRVSKIPDAKSPLPVFAYTRIVFTDQVLKFLSQDELVYTFGETVALGASGIVIWGTLSIMRSMKSCLLLDNYMETILNPYIINVTLAAKMCSQVLCQEQGVCIRKNWNSSDYLHLNPDNFAIQLEKGGKFTVRGKPTLEDLEQFSEKFYCSCYSTLSCKEKADVKDTDAVDVCIADGVCIDAFLKPPMETEEPQIFYNASPSTLSATMF

SEQ ID NO: 187 - protein, 457 aa, Homo sapiens
  PH20 36-492
LNFRAPPVIPNVPFLWAWNAPSEFCLGKFDEPLDMSLFSFIGSPRINATGQGVTIFYVDRLGYYPYIDSITGVTVNGGIPQKISLQDHLDKAKKDITFYMPVDNLGMAVIDWEEWRPTWARNWKPKDVYKNRSIELVQQQNVQLSLTEATEKAKQEFEKAGKDFLVETIKLGKLLRPNHLWGYYLFPDCYNHHYKKPGYNGSCFNVEIKRNDDLSWLWNESTALYPSIYLNTQQSPVAATLYVRNRVREAIRVSKIPDAKSPLPVFAYTRIVFTDQVLKFLSQDELVYTFGETVALGASGIVIWGTLSIMRSMKSCLLLDNYMETILNPYIINVTLAAKMCSQVLCQEQGVCIRKNWNSSDYLHLNPDNFAIQLEKGGKFTVRGKPTLEDLEQFSEKFYCSCYSTLSCKEKADVKDTDAVDVCIADGVCIDAFLKPPMETEEPQIFYNASPSTLSAT

SEQ ID NO: 188 - protein, 453 aa, Homo sapiens
  PH20 36-488
LNFRAPPVIPNVPFLWAWNAPSEFCLGKFDEPLDMSLFSFIGSPRINATGQGVTIFYVDRLGYYPYIDSITGVTVNGGIPQKISLQDHLDKAKKDITFYMPVDNLGMAVIDWEEWRPTWARNWKPKDVYKNRSIELVQQQNVQLSLTEATEKAKQEFEKAGKDFLVETIKLGKLLRPNHLWGYYLFPDCYNHHYKKPGYNGSCFNVEIKRNDDLSWLWNESTALYPSIYLNTQQSPVAATLYVRNRVREAIRVSKIPDAKSPLPVFAYTRIVFTDQVLKFLSQDELVYTFGETVALGASGIVIWGTLSIMRSMKSCLLLDNYMETILNPYIINVTLAAKMCSQVLCQEQGVCIRKNWNSSDYLHLNPDNFAIQLEKGGKFTVRGKPTLEDLEQFSEKFYCSCYSTLSCKEKADVKDTDAVDVCIADGVCIDAFLKPPMETEEPQIFYNASPST

SEQ ID NO: 189 - protein, 451 aa, Homo sapiens
  PH20 36-486
LNFRAPPVIPNVPFLWAWNAPSEFCLGKFDEPLDMSLFSFIGSPRINATGQGVTIFYVDRLGYYPYIDSITGVTVNGGIPQKISLQDHLDKAKKDITFYMPVDNLGMAVIDWEEWRPTWARNWKPKDVYKNRSIELVQQQNVQLSLTEATEKAKQEFEKAGKDFLVETIKLGKLLRPNHLWGYYLFPDCYNHHYKKPGYNGSCFNVEIKRNDDLSWLWNESTALYPSIYLNTQQSPVAATLYVRNRVREAIRVSKIPDAKSPLPVFAYTRIVFTDQVLKFLSQDELVYTFGETVALGASGIVIWGTLSIMRSMKSCLLLDNYMETILNPYIINVTLAAKMCSQVLCQEQGVCIRKNWNSSDYLHLNPDNFAIQLEKGGKFTVRGKPTLEDLEQFSEKFYCSCYSTLSCKEKADVKDTDAVDVCIADGVCIDAFLKPPMETEEPQIFYNASP

SEQ ID NO: 190 - DNA, 2105 bp, Bos taurus
  PH20 DNA
ggtttatctctgttcttggtgaggagacagacagaattgactgctgtgctcatccgcgagggtaaatgtgctcagctctttatggagtagtggagacgggcagagatgacaagatgaagcaacttgcaaaacattcctaaatacgaaggaagaagaatatttaaatgtaaatcatcattattcatttttatccatcaaagtggcttcattctgtgttcatatcttgcatcaaatattaggtacaccaaagcgtgtaggagaaaaaagtgcctttcacagtcatcgctctttgtgatgagaatgctgaggcgccaccatatctcctttcggagctttgctgggtctagcggaacaccccaggcagtgttcaccttccttctgcttccgtgttgtttggctctggacttcagagcaccccctcttatttcaaacacttctttcctctgggcctggaatgccccagttgaacgttgtgttaacagaagatttcaactacctccagatctgagactcttctctgtaaaaggaagcccccagaaaagtgctaccggacaatttattacattattttatgctgatagacttggctactatcctcatatagatgaaaaaacaggcaaaaccgtattcggaggaattccccagttgggaaacttaaaaagtcatatggagaaagcaaaaaatgacattgcctattacataccaaatgacagcgtgggcttggcggtcattgactgggaaaactggaggcctacctgggcaagaaactggaaacctaaagatgtttacagggatgagtcagttgagttggttctgcaaaaaaatccgcaactcagtttcccagaggcttccaagattgcaaaagtggattttgagacagcaggaaagagtttcatgcaagagactttaaaactgggaaaattacttcggccaaatcacttatggggttattatctttttcctgattgttacaatcataatcataaccaacctacttacaatggaaattgccctgatgtagaaaaaaggagaaatgatgatctcgagtggttgtggaaggaaagcactgcccttttcccttctgtttatttgaatatcaggttaaaatctactcaaaatgctgccttgtatgttcgtaatcgtgtccaggaagccattcggttgtctaaaatagcgagtgtcgaaagtccacttccggtttttgtatatgcccgtccagtttttactgatgggtcttcaacatatctttctcagggtgaccttgtgaattcggttggtgagatcgtttctctaggtgcctctgggattataatgtggggcagtctcaatctaagcttatctatgcaatcttgcatgaacctaggcacttacttgaacactacactgaatccttacataatcaacgtcaccctagccgccaaaatgtgcagccaagtgctttgccacaatgaaggagtgtgtacaaggaaacactggaattcaagcgactatcttcacctgaacccaatgaattttgctattcaaactggggaaggtggaaaatacacagtacctgggacagtcacacttgaagacttgcaaaagttttctgatacattttattgcagttgttatgccaacatccactgtaagaagagagttgatataaaaaatgttcatagtgttaacgtgtgtatggcagaagacatttgtatagacagccctgtgaagttacaacccagtgatcattcctccagccaggaggcatctactaccaccttcagcagtatctcaccctccactacaactgccacagtatctccatgtactcctgagaaacactcccctgagtgcctcaaagtcaggtgttcggaagtcatccccaacgtcacccaaaaggcgtgtcaaagtgttaaattgaagaacatttcctatcagtcacctattcaaaatattaaaaatcaaacaacctattaaaattaaattcagtaaaaaaaaaaaaaaaaaaaaaaaaaaaaaaaaaaaaaaaaaaaaaaaaaaaaaaaaaaaaaaaaaaaaaaaaaaaaaaaaaaaaaaaaaaaaaaaaaaaaaaaaaaaaaaaaaaaaaaaagaaaaaaaaaaaaaaa

SEQ ID NO: 191 - DNA, 1971 bp, Bos taurus
  Hyal1 DNA
ttggtgcgcctggtgccagacttaaggaacagaatcttgctgatgcctgcacaggccctcgccctggggtcaggaagtttggagaatgaggcctttcagccttgaggtttccctacacctgccctgggctatggcagcccacttgcttcctgtctgcaccctgttcctgaacttgctcagcatgacccaaggctcccgggaccctgtggtccccaaccagcccttcactaccatctggaatgccaacaccgagtggtgtatgaagaaacacggcgtggacgtagacatcagtatctttgatgtggtgaccaacccggggcagaccttccgcggccctaacatgaccattttctacagctcccagctgggtacctacccttactatacatctgctggggagcctgtgtttggtggcctgccccagaatgccagcctgaatgcccacctggcccgcacattccaggacatcctggctgccatgcctgagcctcgcttctcagggctggcagtcattgactgggaggcatggcgcccgcgctgggccttcaactgggacaccaaggacatttaccggcagcgctcacgggcattggtacagaagcagcacccagactggctagctcctcgggtggaggccgcagctcaggaccagttcgagggggctgcagaggagtggatggcaggcaccctcaagctgggacaagcactgcgccctcagggcctctggggcttctataatttccctgagtgctacaactatgactttaaaagtcccaactatacaggccggtgtccactaaacatctgtgcccagaatgaccagctcgggtggctgtggggccagagccgtgccctctaccccagcatctacctgcctgcagcactggagggcacgaagaagacacagatgttcgtgcagcaccgtgtggctgaggcattccgtgtggcagcgggtgcgggggaccccaagctgccggtgctgccctacatgcagctcttctacgacatgactaaccactttctgcccgcggaggagctggagcacagcctgggggagagtgcagcccagggtgcagcgggagtggtgctctgggtgagctggctgagcacaagcaccaaggaatcatgccaggccatcaaggagtatgtggacacgacgctgggaccctccatcctgaatgtgaccagcggggctcgtctgtgcagtcaggtcctatgctccggccatggccgttgtgcccggcgccccagttaccccaaggcccgcctcatcctcaactccaccagtttttccatcaagcctacacctggtggtgggcccctgaccctacaaggtgccctctcgctcgaggatcggttgcggatggcagtggagttcgaatgtcgctgctaccgtgggtggagggggacacggtgtgagcagtggggcatgtggtgattggcatgggcacgcactgagtacctgatgcaagctgggcctggctaggtagggctttcccaagtccaggcagtcacaggagtcatggttacagtcagaagtccactcagccagtgtcatgagcatacaccagtgtgcacacctgcttacagaccaagatagctgcataaggacacggtgtgagcagtggggcatatgctgattggcatgggcacacactgagtacctgatgcaatctgggcctggctagggctttcccaagtccaggcagtcacaggagtcatggttaggcatccagtcacaggagtcatgtcaggcatcctgccgacagagtcaaaaatacttcctctggagacactgagtcagtcttcaaacagaagcagtcacaagcactgacattcgggacttccctggccatccagtggttaagacacggagcttccactgcagggggcacgggcagagactaagatcacgaatgctaagcggtgcggttaaacaaataacaaataaataaactgacattcactggg

SEQ ID NO: 192 - DNA, 1912 bp, Bos taurus
  Hyal2 DNA
caagtcgccggcgggctgcccaaagggcaggagctggcgcgaatagcttggctagagacttaccccgggaaggagggaggccgccgacctactgggccgacggactcccacacagttcctgagctggtgcctggcaggtgacactgacttcctgcagcccccagcatgtggacaggcctgggccccgccgtcacactggccctggtgttggtggtggcatgggccacggagctgaagcccacagcaccacccatcttcacgggccggccctttgtggtcgcatgggatgtgcccacacaggactgtggcccgcgccacaagatgccattggacccaaaggacatgaaggcctttgatgttcaggcttcacctaacgagggttttgtaaatcagaacatcaccatcttctaccgtgaccggctgggcatgtatccacacttcaattcggtggggaggtcagtacatggtggtgtgccacagaatggcagcctctgggtacacctggagatgctgaagggacacgtggaacactacattcgtacacaggagcctgcagggctggcagtcatcgactgggaggactggcggccagtgtgggtgcgcaactggcaggacaaggatgtgtaccgccgattatcacgccatttggtagccattcgccaccctgattggccaccagagcgcgtagccaaggaggcgcagtatgagtttgagttcgctgcacggcagttcatgctggagacattgcgatttgtcaaggcgtttcggcctcggcacctatggggcttctacctcttccctgactgttacaaccatgattatgtgcagaactgggagacctatacaggccgctgccctgatgttgaggtctcccgaaatgaccagctggcctggctctgggccgagagcacggccctcttcccctctgtctacttggaagagacactggcttcctccactcacggccgcaactttgtcagctttcgtgtccaggaggctcttcgcgtggctgacgtccaccatgccaaccatgcactccccgtctacgtcttcacgaggcccacctatagccgtggactcacagggcttagcgagatggatctcatctccaccattggtgagagtgctgccctgggtgcagctggcgtcatcctctggggtgacgcagggtttaccaccagcaacgagacctgccgacgcctcaaggattatctgactcggtcattggtaccctatgtcgtcaatgtgtcctgggctgcccagtactgcagctgggcccagtgccatggccatgggcgctgtgtgcgccgggaccccaacgctcacaccttcctgcacctcagtgccagcagcttccgtctagtgcctagccacgcacctgatgagccgcggctgcgaccagagggggaactcagttgggccgaccgcaaccacctacagatgcactttcgctgccagtgctacttaggctggggcggtgagcaatgccagtgggaccgcaggcgggcagctgggggtgccagtggggcctgggctgggtcccacctcactggcctgctggcagtggcagtcctggccttcacctagactttgtaagggtctctcacccagctgccacgccagctggcctctgccacaaggggtctgtcaggcatgtaggagcctgcaaggggtggacaaaccagagtctggaggggcagagccctctgggatgcctggtaggatgtccttaccagctcccaccccctgttctaagggggaggggcagtcccctggaaggccccgtctctccctgccagagaggaagaggggcacagctgggccggggaggacctgaccctactcccctgcccctggatagtttattattattattttggggtctcttttgtaaattaaatataaaacaact

SEQ ID NO: 193 - DNA, 1537 bp, Ovis aries
  Hyal2 DNA
gcaaatgacactgacttcctgcagcccccagcatgtggacaggcctgggccccgccgtcacactggccctggtgttggtggtggcatgggccacagagctgaagcccacagcaccacccatcttcacgggccggccctttgtggttgcatgggatgtgcccacacaggactgtggcccacgccacaagatgccattggacccaaaggacatgaaggcctttgatgtgcaggcctcacctaacgagggttttgtaaatcagaacatcaccatcttctaccgtgaccggctgggcatgtatccacacttcaactcggtggggaggtcagtccatggtggtgtgccacagaatggcagcctctgggtacacctggagatgctgaagggacacgtggaacactacattcgtacacaggagcctgcagggctggcagtcatcgactgggaggactggcggccagtgtgggtgcgcaactggcaggacaaggatgtgtaccgccgattatcacgccagttggtggccagtcaccaccccgattggccaccagagcgcatagtcaaggaggcgcagtatgagtttgagttcgctgcacggcagttcatgctggagacactgcgatttgtcaaggcgtttcggcctcggcacctatggggcttctacctcttccctgactgttacaaccatgattatgtgcaaaactgggagacctatacaggccgctgccctgatgttgaggtctcccgaaatgaccagctgtcctggctctgggccgagagcacagccctcttcccctctgtctacctggaagagacgctggcttcctccactcacggccgcaactttgtcagctttcgtgtccaggaggctcttcgcgtggctgacgtccaccatgccaaccatgcactcccagtctacgtcttcacgaggcccacctacagccgtggactcacagggcttagcgagatggatctcatctccaccattggtgagagtgctgccctgggtgcagccggcgtcatcctctggggtgacgcagggtttaccaccagcaacgagacctgccgacgcctcaaggattatctgactcggtcactggtaccctatgtcgtcaatgtgtcctgggctgcccagtactgcagctgggcccagtgccatggccatgggcgctgtgtgcgccgggaccccaacgctcacaccttcctgcacctcagtgccagcagcttccgtctagtgcctagccacgcacctgatgagccgcggctgcgaccagagggggagctcagttgggccgaccgcaaccacctacagacgcactttcgctgccagtgctacttaggctggggcggtgagcagtgccagtgggaccgcaggcgggcagctgggggtgccagtggggcctgggctgggtcccacctcactggcctgctggcagtggcagtcctggccttcacctggacttcgtaagggtctcacccagctgccaggccagctggcctctgccacaaggggtctgccaggcatgtagcagcccacaaggg

SEQ ID NO: 194 - DNA, 1967 bp, Ovis aries
  Hyaluronidase DNA
actcctgtttatctctgttcttggtgaggagacagacagaattgactgctgtgctcatccaccaggttacagatgaagcaacttgcaaaacattcctaaatacgaaggaagaagagtatttaaacgtaaatcatcattattcatttttatccatcaaagtagcttcattctgtgttcctatcttgcatcaaatattaggtaaaccaaagtgtgtaggagaaaaaagtgcttttcatagtcatcgctctttgtgaagagaatgctaaggcgccgccatatctcctttaggagctttgttggggccagtggaacaccccaggcggcgctcgccttccttctgcttccatgttggttggctctggacttcagagcaccccctcttatttcaaacacttctttcctctgggcctggaatgccccagctgaacgttgtgttaaaatctttaaactacctccagatctgagactcttctctgtaaaaggaagcccccaaaaaagtgctacgggacaatttattacattattttatgctgatagacttggctactatcctcatatagatgaaaaaacaggcaacaccgtatatggaggaattccccagttgggaaacttaaaaaatcatttggaaaaagccaaaaaagacattgcctattatataccaaatgacagcgtgggcttggcggtcattgactgggaaaactggaggcctacctgggcaagaaactggaaacctaaagatgtttacagggatgagtctgttgagttggttctgcaaaaaaatccacaactcagtttcccagaggcttccaagattgcaaaagtggattttgagacagcaggaaagagtttcatgcaagagactttaaaactgggaaaattacttcggccaaatcacttatggggttattatctttttcctgattgttacaatcataattataaccagcctacttacaatggaaattgctctgatttagaaaaaaggagaaatgatgatctcgactggttgtggaaggaaagcactgcccttttcccttctgtttatttgaatatcaagttaaaatctactccaaaagctgccttctatgttcgtaatcgtgtccaggaagccattcggttgtctaaaatagcgagtgttgaaagtccacttccggtttttgtatatcaccgtccagtttttactgatgggtcttcaacatacctttctcagggtgaccttgtgaattcggttggtgagatcgttgctctaggtgcctctgggattataatgtggggcagtctcaatctaagcctaactatgcaatcttgcatgaacctaggcaattacttgaacactacactgaatccttacataatcaacgtcaccctagcagccaaaatgtgcagccaagtgctttgccacgatgaaggagtgtgtacaaggaaacaatggaattcaagcgactatcttcacctgaacccaatgaattttgctattcaaactgggaaaggtggaaaatacacagtacctgggaaagtcacacttgaagacctgcaaacgttttctgataaattttattgcagttgttatgccaacatcaactgtaagaagagagttgatataaaaaatgttcatagtgttaatgtatgtatggcagaagacatttgtatagagggccctgtgaagttacaacccagtgatcattcctctagccagaatgaggcatctactaccaccgtcagcagtatctcaccctctactacagccaccacagtatctccatgtactcctgagaaacagtcccctgagtgcctcaaagtcaggtgtttggaagccatcgccaacgtcacccaaacggggtgtcaaggtgttaaatggaagaacacttccagtcagtcaagtattcaaaatattaaaaatcaaacaacctattaaaatataaattcagtgcttattaagaaaaaaaaaaaaaaaaaaaaaaaaaaaa

SEQ ID NO: 195 - DNA, 2116 bp, Homo sapiens
  HAS1
cggagagaagagagagcccggccagacccactgcgatgagacagcaggacgcgcccaagcccactcctgcagcctgccgctgctccggcctggcccggagggtgctgaccatcgccttcgccctgctcatcctgggcctcatgacctgggcctacgccgccggggtgccgctggcctccgatcgctacggcctcctggccttcggcctctacggggccttcctttcagcgcacctggtggcgcagagcctcttcgcgtacctggagcaccggcgggtggcggcggcggcgcgggggccgctggatgcagccaccgcgcgcagtgtggcgctgaccatctccgcctaccaggaggaccccgcgtacctgcgccagtgcctggcgtccgcccgcgccctgctgtacccgcgcgcgcggctgcgcgtcctcatggtggtggatggcaaccgcgccgaggacctctacatggtcgacatgttccgcgaggtcttcgctgacgaggaccccgccacgtacgtgtgggacggcaactaccaccagccctgggaacccgcggcggcgggcgcggtgggcgccggagcctatcgggaggtggaggcggaggatcctgggcggctggcagtggaggcgctggtgaggactcgcaggtgcgtgtgcgtggcgcagcgctggggcggcaagcgcgaggtcatgtacacagccttcaaggcgctcggagattcggtggactacgtgcaggtctgtgactcggacacaaggttggaccccatggcactgctggagctcgtgcgggtactggacgaggacccccgggtaggggctgttggtggggacgtgcggatccttaaccctctggactcctgggtcagcttcctaagcagcctgcgatactgggtagccttcaatgtggagcgggcttgtcagagctacttccactgtgtatcctgcatcagcggtcctctaggcctatataggaataacctcttgcagcagtttcttgaggcctggtacaaccagaagttcctgggtacccactgtacttttggggatgaccggcacctcaccaaccgcatgctcagcatgggttatgctaccaagtacacctccaggtcccgctgctactcagagacgccctcgtccttcctgcggtggctgagccagcagacacgctggtccaagtcgtacttccgtgagtggctgtacaacgcgctctggtggcaccggcaccatgcgtggatgacctacgaggcggtggtctccggcctgttccccttcttcgtggcggccactgtgctgcgtctgttctacgcgggccgcccttgggcgctgctgtgggtgctgctgtgcgtgcagggcgtggcactggccaaggcggccttcgcggcctggctgcggggctgcctgcgcatggtgcttctgtcgctctacgcgcccctctacatgtgtggcctcctgcctgccaagttcctggcgctagtcaccatgaaccagagtggctggggcacctcgggccggcggaagctggccgctaactacgtccctctgctgcccctggcgctctgggcgctgctgctgcttgggggcctggtccgcagcgtagcacacgaggccagggccgactggagcggcccttcccgcgcagccgaggcctaccacttggccgcgggggccggcgcctacgtgggctactgggtggccatgttgacgctgtactgggtgggcgtgcggaggctttgccggcggcggaccgggggctaccgcgtccaggtgtgagtccagccacgcggatgccgcctcaagggtcttcaggggaggccagaggagagctgctgggccccgagccacgaacttgctgggtggttctctgggcctcagtttccctcctctgcaaaacgagggggtcagcccaagattcttcagtctggactatattgggactgggacttctgggtctccagggagggtatttattggtcagggtgtgggatctgaggagtggagggaaagggtcctgctttctcctcgttcttatttaatctccatttctactgtgtgatcaggatgtaataaagaattttatttattttcaaaaaaaaaaaaaaaaaaaaaaaaaaaaa

SEQ ID NO: 196 - DNA, 3275 bp, Homo sapiens
  HAS2
gaagtcaagacgtctggaaagaattacccagtcctggcttcgagcagcccattgaaccagagacttgaaacagccccagccaaagacttttctcccaattctgcgcttcctgggttctgctgagtcttccacaggctttttttttttttttttttttttttaagacgaaaaagagattttctgttatcgggggcagaaagactgaagcccaaaaaaaaaaaaaaaaaaaaaagaaaagaaaagaaaaaagaaaagttaatttatttttaaagcataatttttttaagaattagactgaagtgcaacggaaacataaagagaatattagtgaaattattttttaaagtggggaagaatcaaacatttaagactcccctatcctttttaaatgttgtttttaaatttcttattttttttggccggtcgtctcaaattcatctgatctcttattacctcaattttggaaactgcccgccaccgaccctccgggaccacacagacaggctgaggacgactttatgaccaagagctgaacaagatgcattgtgagaggtttctatgtatcctgagaataattggaaccacactctttggagtctctctcctccttggaatcacagctgcttatattgttggctaccagtttatccaaacggataattactatttctcttttggactgtatggtgcctttttggcatcacacctcatcatccaaagcctgtttgcctttttggagcaccgaaaaatgaaaaaatccctagaaacccccataaagttgaacaaaacagttgccctttgcatcgctgcctatcaagaagatccagactacttaaggaaatgtttgcaatctgtgaaaaggctaacctaccctgggattaaagttgtcatggtcatagatgggaactcagaagatgacctttacatgatggacatcttcagtgaagtcatgggcagagacaaatcagccacttatatctggaagaacaacttccacgaaaagggtcccggtgagacagatgagtcacataaagaaagctcgcaacacgtaacgcaattggtcttgtccaacaaaagtatctgcatcatgcaaaaatggggtggaaaaagagaagtcatgtacacagccttcagagcactgggacgaagtgtggattatgtacaggtttgtgattcagacactatgcttgacccagcctcatctgtggagatggtaaaagttttagaagaagatcccatggttggaggtgttgggggagatgtccagattttaaacaagtacgattcctggatctcattcctcagcagtgtaagatattggatggcttttaatatagaaagggcctgtcagtcttattttgggtgtgttcagtgcattagtggacctctgggaatgtacagaaactccttgttgcatgagtttgtggaagattggtacaatcaagaatttatgggcaaccaatgtagctttggtgatgacaggcatctcacgaaccgggtgctgagcctgggctatgcaacaaaatacacagctcgatctaagtgccttactgaaacacctatagaatatctcagatggctaaaccagcagacccgttggagcaagtcctacttccgagaatggctgtacaatgcaatgtggtttcacaaacatcacttgtggatgacctacgaagcgattatcactggattctttcctttctttctcattgccacagtaatccagctcttctaccggggtaaaatttggaacattctcctcttcttgttaactgtccagctagtaggtctcataaaatcatcttttgccagctgccttagaggaaatatcgtcatggtcttcatgtctctctactcagtgttatacatgtcgagtttacttcccgccaagatgtttgcaattgcaacaataaacaaagctgggtggggcacatcaggaaggaaaaccattgttgttaatttcataggactcattccagtatcagtttggtttacaatcctcctgggtggtgtgattttcaccatttataaggagtctaaaaggccattttcagaatccaaacagacagttctaattgttggaacgttgctctatgcatgctattgggtcatgcttttgacgctgtatgtagttctcatcaataagtgtggcaggcggaagaagggacaacaatatgacatggtgcttgatgtatgatcttccatgttttgacgtttgcagtcacacacaacaccttagttcctctaggggctgtacagtattgtggcatcagataatgccaccaaaggagacatatcactgctgctgggacttgaacaaagacatttatatgggtttattttcattctgccaaagtaaaacaatacatcaacaagaagaaactcagatttaacctgttatttctatgaaaatgggatgaattctttgtttatgcactttttccttactgtgcatccgcctgaaagtgttttgccctatatacctcactagccatgctttatgtgggttatcatggaagaaaaggattttggaaactcaaggaaaagttctttcaacctatacaacctaacttatggactgttttgatagatgataattttttttttttaggaaggattttctttttaactttaccaaatgaaatgccaaaggaagttttaaaggccgttggctgtgctgtattttgatataattgtactgtgtttttaaattttgtatgccaatcttaaagacaaattttgcatattctctattttacttttctgccaaaataaacctgttcttccttttttaaaataaaataagttcttaaaaaatttatacttaaaaaatcctgcccaaaatgtgaagcttggttgactgatgttcatgatagaaagaataaaatgtttctctctctctaccttttaaaattgaatagtttatttctgtgaaagaagtatttaaactttcaatattttaactttttgtttttatttcttttagaaaaggccaatatacctatcacactttggaagtaaaaatacacactttcgtgtgtacctaaaaaaaaaatcgttgaaaatcaaggccaaaggtagtgcaattttttcattaagatttaaaaaaaagggaatgatagtctttgaaagaaaacagtaggcatccagcactggacaaaacatgggtatcaaagatgaataatctttggagattctggcagtgttttcccagaacaagtcaagtggaaagtggagaaattatctgtataattttggacacatacaatgcagtt

SEQ ID NO: 197 - DNA, 4220 bp, Homo sapiens
  HAS3 transcript variant 1
gagtgcgttcgcggctgctttgacctggtgggcgccgcctccggcactgcaccgaggcggggcgccagcgcccaggttgctgggctggccttggcgcccccttcccctacccagagcgcaggcaggcaggggggtcccgccgcgccccttcagcatatgccggtgcagctgacgacagccctgcgtgtggtgggcaccagcctgtttgccctggcagtgctgggtggcatcctggcagcctatgtgacgggctaccagttcatccacacggaaaagcactacctgtccttcggcctgtacggcgccatcctgggcctgcacctgctcattcagagcctttttgccttcctggagcaccggcgcatgcgacgtgccggccaggccctgaagctgccctccccgcggcggggctcggtggcactgtgcattgccgcataccaggaggaccctgactacttgcgcaagtgcctgcgctcggcccagcgcatctccttccctgacctcaaggtggtcatggtggtggatggcaaccgccaggaggacgcctacatgctggacatcttccacgaggtgctgggcggcaccgagcaggccggcttctttgtgtggcgcagcaacttccatgaggcaggcgagggtgagacggaggccagcctgcaggagggcatggaccgtgtgcgggatgtggtgcgggccagcaccttctcgtgcatcatgcagaagtggggaggcaagcgcgaggtcatgtacacggccttcaaggccctcggcgattcggtggactacatccaggtgtgcgactctgacactgtgctggatccagcctgcaccatcgagatgcttcgagtcctggaggaggatccccaagtagggggagtcgggggagatgtccagatcctcaacaagtacgactcatggatttccttcctgagcagcgtgcggtactggatggccttcaacgtggagcgggcctgccagtcctactttggctgtgtgcagtgtattagtgggcccttgggcatgtaccgcaacagcctcctccagcagttcctggaggactggtaccatcagaagttcctaggcagcaagtgcagcttcggggatgaccggcacctcaccaaccgagtcctgagccttggctaccgaactaagtataccgcgcgctccaagtgcctcacagagacccccactaagtacctccggtggctcaaccagcaaacccgctggagcaagtcttacttccgggagtggctctacaactctctgtggttccataagcaccacctctggatgacctacgagtcagtggtcacgggtttcttccccttcttcctcattgccacggttatacagcttttctaccggggccgcatctggaacattctcctcttcctgctgacggtgcagctggtgggcattatcaaggccacctacgcctgcttccttcggggcaatgcagagatgatcttcatgtccctctactccctcctctatatgtccagccttctgccggccaagatctttgccattgctaccatcaacaaatctggctggggcacctctggccgaaaaaccattgtggtgaacttcattggcctcattcctgtgtccatctgggtggcagttctcctgggagggctggcctacacagcttattgccaggacctgttcagtgagacagagctagccttccttgtctctggggctatactgtatggctgctactgggtggccctcctcatgctatatctggccatcatcgcccggcgatgtgggaagaagccggagcagtacagcttggcttttgctgaggtgtgacatggcccccaagcagagcgggtaaagtgcaatgggtaagggagggaaggggaatggaagagaaaagacagggtgggagggaggagggagtgctgtgttttagtctcttaatggtccaaaggacaaatctaaaatgcaaagaacggtgatgtagtatggcctgacagctctgtttagaggaggcaacactgatcccccagatgcagggctgcaggggattctgtgttttcagactgcctgtctgcttgcatctgcacataggcagtagcctcctcctgggctccagagggcactcagaagttgtgctaaaccaagttaagtcccattcagtggcaacttgtgataggtacctgagtgacggcaacctgcggaaggaggttctcccagcccatctgaacacaaccagaggtggcaggagaatttctactgagcgagctgggccggttagtgtatgtcacccccaccccacccctaagtagtcatcaatgcaataagattgcgcctgagatacaaggcccagaagcctgatctttgggcatcagaaaacagggtccaggaatggtgctttatgtgagataccccactccacatcaacattccagggatgagccaaaccagcagggagttagcactgaactgcttttaaaagtgcacattaaaaaggaaagtttgccaggaggaacaaagagattgtggtggtgctaaaggaggccataagctacacagaggccttgggtgttccacctggaaactgctcagacgtctagatgggttcttagcttgtctgtgatctctgctggggagataaaaagattaagccccaacatgttcagaaaagaagtgaagtcttgggtattttaacctgtatactcttgaattcctctcaaattcagctctgatctgaggctaagacacactccccacttcactttcttcaaagccacattttttgaggtatcactgcagtcacctcttctaccctcatcatcataggtaaggttttcaaggtggcaattggggcggagccccggctcttatagaagcttcagcaggaggcaagcgtgttctcagcacatatgggaactatgaggagcctctgatcaaattggctacaatcttggagctgcttggacggattccttggcagccgggttagcatgtgtgactttcaggctactgttcttgacaatcatctccaatggaaagcttttcagtgttcccaaagtgaactctcaaatccaaaatggttatctttgagaccatccattctcctcagtggcttctccagggaattcttacagccaagttgtgacagtcactgcatttgcctgcttctttccagaaaccaaactaggagatgaaactggttcctacatcctaaggttcttgctttctctctcatgcctcctgaggctgtttttggctgttttccctctgctgcttttggggaatgaggggaagccattttccagtgacttgcaatccaggctgttctcagcgttttgagtttaaaacctgggatcctgactaagcctttgacttaagggttgcttgcttgccctccaaatgtcctttctcagaggggccagctaacccgtgcagaaccagcactaaggtggacagcagacaagagggcaagcctctagtgtaccaagtgcttcctacaaagacgcaaggtgtgctctgagccacagatgggcaaaccctggtgctttccttcatctcccacgaactcaagggttttccaggtgtagctaacagttgccacatcacacagacctcgagtttctggtaagactgctggttgacatcagacccaacccatgaaggctggaaggcagcaggcatttgctaaggcagctgatccaggcaatcgttctgctggccaagaagttaaactattttgagcattagaatggaggaaatccggtcagccaagtgcagagttcagacttcgctaagggcttgtttttcttcagcatttacttgaagattaatgtaggatgacaggctctcctggctgtcctaccatcagctctgccttgcactgtggtcgtcaactttcctcaaatcaaaaacaggcaggtacaggtagtgggctcacaacgtttgacctcgactggtttttctaagttattttgtacatttttcagcagcaaaaccaaactgggtcttcagctttatccccgtttcttgcaagggaagagcctttatacaattggacgcattttggtttttcctcattgagaattcaaatcctcttttgtattgtttctacaataatttgtaaacatatttatttttacctgcttttttttttttttttaattttcaggtcaagttttttatactgcacttatttgtcaaaataaagattctcacatatgccggttatctcgaaa

SEQ ID NO: 198 - DNA, 1229 bp, Homo sapiens
  HAS3 transcript variant 2
ggaggggcatggagccgccgcgggcctgctgagctccggagcgcggcagccggcggcacgatgccggtgcagctgacgacagccctgcgtgtggtgggcaccagcctgtttgccctggcagtgctgggtggcatcctggcagcctatgtgacgggctaccagttcatccacacggaaaagcactacctgtccttcggcctgtacggcgccatcctgggcctgcacctgctcattcagagcctttttgccttcctggagcaccggcgcatgcgacgtgccggccaggccctgaagctgccctccccgcggcggggctcggtggcactgtgcattgccgcataccaggaggaccctgactacttgcgcaagtgcctgcgctcggcccagcgcatctccttccctgacctcaaggtggtcatggtggtggatggcaaccgccaggaggacgcctacatgctggacatcttccacgaggtgctgggcggcaccgagcaggccggcttctttgtgtggcgcagcaacttccatgaggcaggcgagggtgagacggaggccagcctgcaggagggcatggaccgtgtgcgggatgtggtgcgggccagcaccttctcgtgcatcatgcagaagtggggaggcaagcgcgaggtcatgtacacggccttcaaggccctcggcgattcggtggactacatccaggtgtgcgactctgacactgtgctggatccagcctgcaccatcgagatgcttcgagtcctggaggaggatccccaagtagggggagtcgggggagatgtccagcccccagggaaaggtatggcagtagaggatgaccaggtccaagctgcccaggtcagagctacggaagcatggtccgttcaccaacgccacgtttctagagagcagtgagctgattctccaatggtgagcaggggactacatgtgaactgggacctgcaggccaatgtatccctgaggaaaagtccacaagaacaattcaagaaactagtaagaaacaatgggcagaaagctgtgggacgaaagcacagcaggcttctgggaggctggagatcctttctctcaagggcaggattattcccacctgccacagttcacatgccacaaataacatctcaccttcagtcaagaaaaacgcaaaggaaaaaaaaaaaaaaaaaaaaaaaaaaaaaaaaaaaaaaaaaaaaaaaaaaaaaaaaaaaaaaaaaaaaaaa

SEQ ID NO: 199 - protein, 509 aa, Pan troglodyte
  Precursor chimpanzee PH20 XP_527873
MGVLKFKHIFFRSFVKSSGVSQIVFTFLLIPCCLTLNFRAPPVIPNVPFLWAWNAPSEFCLGKFDEPLDMSLFSFIGSPRINVTGQDVTIFYVDRLGYYPYIDSITGVTVNGGIPQKISLQDHLDKAKKDITFYMPVDNLGMAVIDWEEWRPTWARNWKPKDVYKNRSIELVQQQNVQLSLTEATEKAKQEFEKAGKDFLVETIKLGKLLRPNHLWGYYLFPDCYNHHYKKPGYNGSCFNVEIKRNDDLSWLWNESTALYPSIYLNTQQSPVAATLYVRNRVQEAIRVSKIPDAKSPLPVFVYTRIVFTDQVLKFLSQDELVYTFGETVALGASGIVIWGTLSIMRSMKSCLLLDNYMETILNPYIINVTLAAKMCSQVLCQEQGVCIRKNWNSSDYLHLNPDNFAIQLEKGGKFTVRGKPTLEDLEQFSEKFYCSCYSTLSCKEKADVKDTDAVDVCIADGVCIDAFLKPPMETEESQIFYNASPSTLSATMFIVSILFLIISSVASL

SEQ ID NO: 200 - protein, 474 aa, Pan troglodyte
  mature chimpanzee PH20 XP_527873
LNFRAPPVIPNVPFLWAWNAPSEFCLGKFDEPLDMSLFSFIGSPRINVTGQDVTIFYVDRLGYYPYIDSITGVTVNGGIPQKISLQDHLDKAKKDITFYMPVDNLGMAVIDWEEWRPTWARNWKPKDVYKNRSIELVQQQNVQLSLTEATEKAKQEFEKAGKDFLVETIKLGKLLRPNHLWGYYLFPDCYNHHYKKPGYNGSCFNVEIKRNDDLSWLWNESTALYPSIYLNTQQSPVAATLYVRNRVQEAIRVSKIPDAKSPLPVFVYTRIVFTDQVLKFLSQDELVYTFGETVALGASGIVIWGTLSIMRSMKSCLLLDNYMETILNPYIINVTLAAKMCSQVLCQEQGVCIRKNWNSSDYLHLNPDNFAIQLEKGGKFTVRGKPTLEDLEQFSEKFYCSCYSTLSCKEKADVKDTDAVDVCIADGVCIDAFLKPPMETEESQIFYNASPSTLSATMFIVSILFLIISSVASL

SEQ ID NO: 201 - protein, 477 aa, Macaca mulatta
  mature Rhesus monkey PH20 EHH17639
LNFRAPPIIPNVPFLWAWNAPSEFCLGKFNEPLDMSLFTLMGSPRINITGQGVTIFYVDRLGYYPYIDLTTGVTVHGGIPQKVSLQDHLDKSKQDILFYMPVDNLGMAVIDWEEWRPTWARNWKPKDVYKNRSIELVQQQNVQLSLPQATDKAKQEFEKAGKDFMLETIKLGRSLRPNHLWGYYLFPDCYNHHYRKPGYNGSCFDVEIKRNDDLSWLWNESTALYPSIYLNTQQSVVVATLYVRNRVREAIRVSKIPDAKNPLPVFVYARLVFTDQVLKFLSREELVSTLGETVALGASGIVIWGSLSITRSMKSCLLLDTYMETILNPYIINVTLAAKMCSQVLCQEQGVCIRKDWNSSDYLHLNPDNFDIRLEKGGKFTVHGKPTVEDLEEFSEKFYCSCYTNLSCKEKADVKDTDAVDVCIADGVCIDASLKPPVETEGSPPIFYNTSSSTVSTTMFIWRLEVWDQGISRIGFF

SEQ ID NO: 202 - protein, 475 aa, Macaca fascicularis
  mature Cynomolgus monkey PH20 P38568.1
LNFRAPPIIPNVPFLWAWNAPSEFCLGKFNEPLDMSLFTLMGSPRINVTGQGVTIFYVDRLGYYPYIDLTTGVTVHGGIPQKVSLQDHLDKSKQDILFYMPVDNLGMAVIDWEEWRPTWARNWKPKDVYKNRSIELVQQQNVQLSLPQATDKAKQEFEKAGKDFMLETIKLGRSLRPNHLWGYYLFPDCYNHHYRKPGYNGSCFDVEIKRNDDLSWLWNESTALYPSIYLNTQQSVVVATLYVRNRVREAIRVSKIPDAKNPLPVFVYARLVFTDQVLKFLSREELVSTLGETVALGASGIVIWGSLSITRSMKSCLLLDTYMETILNPYIINVTLAAKMCSQVLCQEQGVCIRKDWNSSDYLHLNPDNFDIRLEKGGKFTVHGKPTVEDLEEFSEKFYCSCYTNLSCKEKADVKDTDAVDVCIADGVCIDASLKPPVETEGSPPIFYNTSSSTVSTTMFIVNILFLIISSVASL

SEQ ID NO: 203 - protein, 518 aa, Bos taurus
  Mature cow PH20
LDFRAPPLISNTSFLWAWNAPVERCVNRRFQLPPDLRLFSVKGSPQKSATGQFITLFYADRLGYYPHIDEKTGKTVFGGIPQLGNLKSHMEKAKNDIAYYIPNDSVGLAVIDWENWRPTWARNWKPKDVYRDESVELVLQKNPQLSFPEASKIAKVDFETAGKSFMQETLKLGKLLRPNHLWGYYLFPDCYNHNHNQPTYNGNCPDVEKRRNDDLEWLWKESTALFPSVYLNIRLKSTQNAALYVRNRVQEAIRLSKIASVESPLPVFVYARPVFTDGSSTYLSQGDLVNSVGEIVSLGASGIIMWGSLNLSLSMQSCMNLGTYLNTTLNPYIINVTLAAKMCSQVLCHNEGVCTRKHWNSSDYLHLNPMNFAIQTGEGGKYTVPGTVTLEDLQKFSDTFYCSCYANIHCKKRVDIKNVHSVNVCMAEDICIDSPVKLQPSDHSSSQEASTTTFSSISPSTTTATVSPCTPEKHSPECLKVRCSEVIPNVTQKACQSVKLKNISYQSPIQNIKNQTTY

SEQ ID NO: 204 - protein, 439 aa, Bos taurus
  mature cow PH20 AAP55713
LDFRAPPLISNTSFLWAWNAPVERCVNRRFQLPPDLRLFSVKGSPQKSATGQFITLFYADRLGYYPHIDEKTGKTVFGGIPQLGNLKSHLEKAKNDIAYYIPNDSVGLAVIDWENWRPTWARNWKPKDVYRDESVELVLQKNPQLSFPEASKIAKVDFETAGKSFMQETLKLGKLLRPNHLWGYYLFPDCYNHNHNQPTYNGNCPDVEKRRNDDLEWLWKESTALFPSVYLNIRLKSTQNAALYVRNRVQEAIRLSKIASVESPLPVFVYARPVFTDGSSTYLSQGDLVNSVGEIVSLGASGIIMWGSLNLSLSVQSCMNLGTYLNTTLNPYIINVTLAAKMCSQVLCHDGGVCTRKHWNSSDYLHLNPMNFAIQTGEGGKYTVPGTLTLEDLQKFSDTFYCSCYSNLSCKKRVDIKNVHSVDVCMAEDVCIDAFLKPP

SEQ ID NO: 205 - protein, 477 aa, Mus musculus
  Mature mouse PH20 NP_001073344.1
VDYRAAPILSNTTFLWIWNVPTERCVGNVNDPIDLSFFSLIGSPRKTATGQPVTLFYVDRLGLYPHIDANQAEHYGGIPQRGDYQAHLRKAKTDIEHYIPDDKLGLAIIDWEEWRPTWLRNWKPKDNYRNKSIELVQSTNPGLSITEATQKAIQQFEEAGRKFMEGTLHLGKFLRPNQLWGYYLFPDCYNNKFQDPKYDGQCPAVEKKRNDNLKWLWKASTGLYPSVYLKKDLKSNRQATLYVRYRVVEAIRVSKVGNASDPVPIFVYIRLVFTDRTSEYLLEDDLVNTIGEIVALGTSGIIIWDAMSLAQRAAGCPILHKYMQTTLNPYIVNVTLAAKMCSQTLCNEKGMCSRRKESSDVYLHLNPSHFDIMLTETGKYEVLGNPRVGDLEYFSEHFKCSCFSRMTCKETSDVKNVQDVNVCVGDNVCIKAKVEPNPAFYLLPGKSLLFMTTLGHVLYHLPQDIFVFPRKTLVSTP

SEQ ID NO: 206 - protein, 477 aa, Rattus norvegicus
  Mature rat PH20 NP_446419.1
VDYRATPVLSDTTFVWVWNVPTEACVENVTEPIDLSFFSLIGSPRKTAIGQPVTLFYVDRLGNYPHIDAQQTEHHGGIPQKGDLTTHLVKAKEDVERYIPTDKLGLAIIDWEEWRPTWMRNWTPKDIYRNKSIELVQAADPAINITEATVRAKAQFEGAAKEFMEGTLKLGKHIRPKHLWGFYLFPDCYNNKFQVDNYDGQCPDVEKKRNDDLDWLWKESTGLYPSVYLKKDLKSSRKATLYVRYRVLESIRVSKVSDESNPVPIFVYIRLVFTDHVSEYLLEDDLVNTIGEIVAQGTSGIIIWDAMSLAQRSAGCPILRQYMKTTLNPYIVNVTLAAKMCSQTLCKEKGMCSRKTESSDAYLHLDPSSFSINVTEAGKYEVLGKPEVKDLEYFSEHFKCSCFSKMTCEETSDMRSIQDVNVCMGDNVCIKATLGPNSAFHLLPGKGLLLMTTLAHILHHLPHDIFVFPWKMLVSTP

SEQ ID NO: 207 - protein, 510 aa, Oryctolagus cuniculus
  Mature rabbit PH20 NP_001076141.1
ANFRAPPVIPNVPFLWAWNAPTEFCLGKSGEPLDMSLFSLFGSPRKNKTGQGITIFYVDRLGYYPYIDPHTGAIVHGRIPQLGPLQQHLTKLRQEILYYMPKDNVGLAVIDWEEWLPTWLRNWKPKDIYRIKSIELVKSQHPQYNHSYATEKAKRDFEKAGKDFMEETLKLGRLLRPNHLWGYYLFPDCYNHHYDKPNLYKGSCFDIEKKRNDDLSWLWKESTALFPSVYLTSRARSATALSKLYVVRNRVHEAIRVSKIPDDKSPLPNFVYTRLVFTDQIFQFLSHHDLVYTIGEIVALGASGIVVWGSQSLARSMKSCLHLDNYMKTILNPYLINVTLAAKMCNQVLCQEQGVCTRKNWNPNDYLHLNPGNFAIQLGSNGTYKVDGKPTLTDLEQFSKNFQCSCYTNLNCKERTDMNNVRTVNVCAVENVCIDTNVGPQAVTYAPKEKKDVAHILSNTTSINSSTTMSLPFPRKHVSGCLLVLCMYSQYLNICYRLVAIGIQHGYYLK

SEQ ID NO: 208 - protein, 494 aa, Cavia porcellus
  mature guinea pig PH20 NP_001166492.1
DKRAPPLIPNVPLLWVWNAPTEFCIGGTNQPLDMSFFSIVGTPRKNITGQSITLYYVDRLGYYPYIDPHTGAIVHGGLPQLMNLQQHLRKSRQDILFYMPTDSVGLAVIDWEEWRPTWTRNWRPKDIYRNKSIELVKSQHPQYNHSYAVAVAKRDFERTGKAFMLETLKLGKSLRPSSLWGYYLFPDCYNTHFTKPNYDGHCPPIELQRNNDLQWLWNDSTALYPSVYLTSRVRSSQNGALYVRNRVHESIRVSKLMDDKNPLPIYVYIRLVFTDQTTTFLELDDLVHSVGEIVPLGVSGIIIWGSLSLTRSLVSCIGLENYMKGTLLPYLINVTLAAKMCGQVLCKNQGICTRKDWNTNTYLHLNATNFDIELQQNGKFVVHGKPSLEDLQEFSKNFHCSCYTNVACKDRLDVHNVRSVNVCTANNICIDAVLNFPSLDDDDEPPITDDTSQNQDSISDITSSAPPSSHILPKDLSWCLFLLSIFSQHWKYLL

SEQ ID NO: 209 - protein, 540 aa, Vulpes vulpes
  Precursor Red Fox PH20
MGVLRFQNIFFRSFLGSSGTTQAVFIFLLIPRCLTQEFRAPPFIPNVSFLWGWNAPTELCAKRFNVQLDLNLFSLIGSPLKTVVGQGIAIFYADRLGYYPHINKTTGKHVNGGIPQLGSLKKHLDKAKKDISHYIETDSMGLAVIDWDSWRPNWARNWRPKHIYKEQSIDLAQQQHIHLNLTEVTQIAQADFEKAARCFMQETLKLGKFLRPNYLWGFYLYPDCYNYNYKNPNYNGSCYDIEERRNDEIDWLWKESTALFPSIYLKSKLKSSPFTALYVRNRVLEAIRVSKVKDIKHPLPIFVYARPVFTDVLLTYLTEDDLVNTIGESVSLGVSGIVMWGSLNLTENVQICTELDTYIKNKLNPYIINVTLAAKMCSQVLCQDEGVCIRKHWNSNDYLHLNPVNFAIQLERSGRYTVQGKPTLEDLQQFSKKFYCACYANTHCRERVDMTDIHTIKVCVGEDVCIDVYLNLVPSGHLPVWKGKYVTSSNIFSVMPPATGPPCVPGRDLNRCLKARFIVEDNSKTTQTGYQSIYIKNKKQ

SEQ ID NO: 210 - protein, 505 aa, Vulpes vulpes
  Mature Red Fox PH20 Q29152
QEFRAPPFIPNVSFLWGWNAPTELCAKRFNVQLDLNLFSLIGSPLKTVVGQGIAIFYADRLGYYPHINKTTGKHVNGGIPQLGSLKKHLDKAKKDISHYIETDSMGLAVIDWDSWRPNWARNWRPKHIYKEQSIDLAQQQHIHLNLTEVTQIAQADFEKAARCFMQETLKLGKFLRPNYLWGFYLYPDCYNYNYKNPNYNGSCYDIEERRNDEIDWLWKESTALFPSIYLKSKLKSSPFTALYVRNRVLEAIRVSKVKDIKHPLPIFVYARPVFTDVLLTYLTEDDLVNTIGESVSLGVSGIVMWGSLNLTENVQICTELDTYIKNKLNPYIINVTLAAKMCSQVLCQDEGVCIRKHWNSNDYLHLNPVNFAIQLERSGRYTVQGKPTLEDLQQFSKKFYCACYANTHCRERVDMTDIHTIKVCVGEDVCIDVYLNLVPSGHLPVWKGKYVTSSNIFSVMPPATGPPCVPGRDLNRCLKARFIVEDNSKTTQTGYQSIYIKNKKQ

SEQ ID NO: 211 - protein, 585 aa, Artificial Sequence [sequence omitted]

1. A method of reducing or ameliorating insulin resistance in a subject, comprising:
administering to a subject who exhibits a symptom of insulin resistance, a hyaluronan-degrading enzyme, wherein:
the hyaluronan-degrading enzyme is conjugated to a polymer; and
the hyaluronan-degrading enzyme is administered in an amount sufficient to remove or degrade skeletal muscle-associated hyaluronan, whereby hyaluronan is degraded, resulting in a decrease or elimination of insulin resistance.

2. The method of claim 1, wherein the hyaluronan-degrading enzyme is administered a plurality of times.

3. The method of claim 1, wherein the hyaluronan-degrading enzyme is administered at a predetermined frequency.

4. The method of claim 1, wherein the hyaluronan-degrading enzyme is administered until a symptom of insulin resistance is reduced by at least 5%, 10%, 20%, 30%, 40%, 50%, 60%, 70%, 80% or more compared to the symptom prior to treatment.

5. The method of claim 3, wherein the hyaluronan-degrading enzyme is administered to the subject at a frequency of at least once a month.

6. The method of claim 3, wherein the hyaluronan-degrading enzyme is administered at a frequency of at least twice a month.

7. The method of claim 3, wherein the hyaluronan-degrading enzyme is administered at a frequency of at least twice a week, three times a week, four times a week, five times a week, six times a week or seven times a week.

8. The method of claim 3, wherein the hyaluronan-degrading enzyme is administered at a frequency of at least twice a week.

9. The method of claim 3, wherein the hyaluronan-degrading enzyme is administered at the frequency of administration for a predetermined time in a cycle of administration.

10. The method of claim 9, wherein the predetermined time is at least or is one week, two weeks, three weeks, four weeks, two months, three months, four months, five months, six months, seven months, eight months, nine months, 10 months, 11 months or 12 months.

11. The method of claim 9, wherein the cycle of administration is repeated a plurality of times.

12. The method of claim 1, wherein the subject is obese.

13. The method of claim 12, wherein the subject has a body mass index (BMI) of greater than 30 kg/m².

14. The method of claim 12, wherein:
the subject has a BMI of greater than 32 kg/m², 33 kg/m², 34 kg/m², 35 kg/m², 40 kg/m², 45 kg/m² or greater; or
the subject has a BMI of between about 30 kg/m² to 50 kg/m²; 30 kg/m² to 40 kg/m²; 35 kg/m² to 50 kg/m²; 30 kg/m² to 35 kg/m²; or 35 kg/m² to 40 kg/m².

15. The method of claim 1, wherein the subject exhibits one or more of hyperglycemia, dyslipidemia, hyperlipidemia, or hyperinsulinemia.

16. The method of claim 1, wherein the subject exhibits insulin resistance as assessed by fasting insulin levels, a glucose tolerance test (GTT), a hyperinsulinemic euglycemic clamp, an insulin tolerance test (ITT), an insulin sensitivity test (IST), continuous infusion of glucose with model assessment (CIGMA), homeostatic model assessment (HOMA-IR), quantitative insulin sensitivity check index (QUICKI), McAuley's index, Matsuda index, Belfiore index, Cederholm index, Gutt index, Avignon index and Stumboll index.

17. The method of claim 1, wherein:
the subject exhibits insulin resistance as assessed by fasting insulin levels; and
the fasting insulin levels are greater than 10 Units/mL, 15 Units/mL, 20 Units/mL, 25 Units/mL, 30 Units/mL, 35 Units/mL, 40 Units/mL or higher.

18. The method of claim 1, wherein:
the subject exhibits insulin resistance as assessed by a method selected from among:
a) homeostasis model assessment (HOMA-IR); wherein the HOMA-IR is greater than 2.2, 2.3, 2.5, 2.6, 2.7, 2.8, 2.9, 3.0, 3.5, 4.0, 5.0 or 6.0; or.
b) hyperinsulinemic euglycemic clamp with insulin infused at a rate of about or at least 40 mU/m²/min, wherein the subject exhibits a glucose disposal rate (GDR) of less than 7.5 mg/kg per minute, less than 7.0 mg/kg per minute, 6.5 mg/kg per minute, 6.0 mg/kg per minute, 5.5 mg/kg per minute, 5.0 mg/kg per minute, 4.5 mg/kg per minute, 4.0 mg/kg per minute, 3.5 mg/kg per minute, 3.0 mg/kg per minute or lower; or
c) quantitative insulin sensitivity check index (QUICKI), wherein the QUICKI is less than 0.360, 0.359, 0.358, 0.357, 0.355, 0.350, 0.345, 0.340, 0.335, 0.330, 0.325, 0.320, 0.315 or 0.310; or
d) McAuley's index, wherein the McAuley's index is less than 6.0, 5.9, 5.8, 5.7, 5.6, 5.5, 5.0, 4.5, 4.0, 3.5 or 3.0.

19. The method of claim 1, comprising: prior to administering the hyaluronan-degrading enzyme to the subject, selecting a subject for treatment having increased or accumulated skeletal muscle-associated hyaluronan.

20. The method of claim 19, wherein selecting a subject comprises:
a) measuring the expression or level of a hyaluronan-associated marker in a sample from a subject;
b) comparing the expression or level of the marker to expression or level of the same marker in a control sample or standard; and
c) if the marker is changed compared to the control sample or standard, selecting the subject for treatment with the hyaluronan-degrading enzyme.

21. The method of claim 20, wherein the expression or level of the marker is elevated or increased compared to the control sample or standard.

22. The method of claim 21, wherein the expression or level of the marker is elevated or increased at least 0.5-fold, 1-fold, 2-fold, 2.5-fold, 3.0-fold, 4.0-fold, 5.0-fold or greater.

23. The method of claim 20, wherein the expression or level of the marker is decreased compared to the control sample or standard.

24. The method of claim 23, wherein the expression or level of the marker is decreased at least 0.5-fold, 1-fold, 2-fold, 2.5-fold, 3.0-fold, 4.0-fold, 5.0-fold or greater.

25. The method of claim 20, wherein the hyaluronan-associated marker is selected from among hyaluronan (HA), a hyaluronidase, a hyaluronan synthase, interstitial fluid pressure, vascular volume and water content.

26. The method of claim 25, wherein the marker is hyaluronan (HA), and the hyaluronan is detected using an anti-HA antibody or an HA-binding protein.

27. The method of claim 25, wherein the marker is a hyaluronan synthase that is hyaluronan synthase 2 (HAS2).

28. The method of claim 20, wherein the sample is a fluid sample selected from among blood (plasma), urine and saliva.

29. The method of claim 20, wherein the sample is a sample from skeletal muscle.

30. The method of claim 20, wherein the control sample in b) is selected from among:
a) an analogous sample from another subject that is a normal subject or a subject known to express low hyaluronan in the sample; and
b) a cell line.

31. The method of claim 1, wherein the subject has a disease or condition associated with insulin resistance that is selected from among obesity, type 2 diabetes, hypertension, dyslipidemia, coronary artery disease, atherosclerosis and polycystic ovarian syndrome.

32. The method of claim 1, wherein reducing or ameliorating insulin resistance prevents or ameliorates a disease or condition associated with insulin resistance selected from among obesity, type 2 diabetes, hypertension, dyslipidemia, coronary artery disease, atherosclerosis and polycystic ovarian syndrome.

33. The method of claim 1, wherein the hyaluronan-degrading enzyme is a hyaluronidase.

34. The method of claim 33, wherein the hyaluronidase is a PH20 or a truncated form thereof that lacks a C-terminal glycosylphosphatidylinositol (GPI) attachment site or a portion of the GPI attachment site.

35. The method of claim 33, wherein the hyaluronidase is a PH20 that is a human.

36. The method of claim 35, wherein:
the hyaluronan-degrading enzyme is a C-terminally truncated PH20 that does not consist of the full-length sequence of PH20 set forth in SEQ ID NO:1; and
the truncated PH20 comprises at least the sequence of amino acids 36-464 of SEQ ID NO:1, or comprises a sequence of amino acids that has at least 85% sequence identity to the sequence of amino acids that contains at least amino acids 36-464 of SEQ ID NO:1 and retains hyaluronidase activity.

37. The method of claim 36, wherein the hyaluronan-degrading enzyme is a truncated PH20 that comprises a sequence of amino acids that has at least 86%, 87%, 88%, 89%, 90%, 91%, 92%, 93%, 94%, 95%, 96%, 97%, 98% or 99% sequence identity to a sequence of amino acids that contains at least amino acids 36-464 of SEQ ID NO:1 and retains hyaluronidase activity.

38. The method of claim 36, wherein:
the PH20 comprises a sequence of amino acids that contains a C-terminal truncation at or after amino acid position 465, 466, 467, 468, 469, 470, 471, 472, 473, 474, 475, 476, 477, 478, 479, 480, 481, 482, 483, 484, 485, 486, 487, 488, 489, 490, 491, 492, 493, 494, 495, 496, 497, 498, 499 or 500 of the sequence of amino acids set forth in SEQ ID NO:1, or is a variant thereof that exhibits at least 85% sequence identity to a sequence of amino acids that contains a C-terminal truncation after amino acid position 465, 466, 467, 468, 469, 470, 471, 472, 473, 474, 475, 476, 477, 478, 479, 480, 481, 482, 483, 484, 485, 486, 487, 488, 489, 490, 491, 492, 493, 494, 495, 496, 497, 498, 499 or 500 of the sequence of amino acids set forth in SEQ ID NO:1 and retains hyaluronidase activity; or
the PH20 consists of the sequence of amino acids set forth in any of SEQ ID NOS: 4-9, 47, 48, 150-170, 183-189, or a sequence of amino acids that exhibits at least 85% sequence identity to any of SEQ ID NOS: 4-9, 47, 48, 150-170, 183-189.

39. The method of claim 38, wherein:
the PH20 comprises a sequence of amino acids that has at least 86%, 87%, 88%, 89%, 90%, 91%, 92%, 93%, 94%, 95%, 96%, 97%, 98% or 99% sequence identity to a sequence of amino acids that contains a C-terminal truncation after amino acid position 465, 466, 467, 468, 469, 470, 471, 472, 473, 474, 475, 476, 477, 478, 479, 480, 481, 482, 483, 484, 485, 486, 487, 488, 489, 490, 491, 492, 493, 494, 495, 496, 497, 498, 499 or 500 of the sequence of amino acids set forth in SEQ ID NO:1 and retains hyaluronidase activity; or
the PH20 consists of a sequence of amino acids that exhibits at least 86%, 87%, 88%, 89%, 90%, 91%, 92%, 93%, 94%, 95%, 96%, 97%, 98% or 99% sequence identity to the sequence of amino acids set forth in any of SEQ ID NOS: 4-9, 47, 48, 150-170, 183-189.

40. The method of claim 35, wherein the PH20 is a composition designated rHuPH20 and contains a polypeptide that consists of amino acids 36-482 of SEQ ID NO:1.

41. The method of claim 1, wherein the polymer is a polyalkylene glycol, dextran, pullulan or cellulose.

42. The method of claim 41, wherein the polyalkylene glycol is selected from among polyethylene glycols (PEG) or methoxypolyethylene glycols (mPEG).

43. The method of claim 40, wherein the polymer is a polyethylene glycol (PEG).

44. The method of claim 41, wherein the polymer is a PEG, and the PEG is a branched or linear PEG.

45. The method of claim 1, wherein the hyaluronan-degrading enzyme is administered in a dosage range amount of between or about between 0.001 μg/kg to 25 mg/kg (of the subject).

46. The method of claim 45, wherein the hyaluronan-degrading enzyme is administered in a dosage range amount of between or about between 0.5 μg/kg to 10 μg/kg.

47. The method of claim 1, wherein the hyaluronan-degrading enzyme is administered orally, intravenously (IV), subcutaneously, intramuscularly, intra-tumorally, intradermally, topically, transdermally, rectally, intrathecally or sub-epidermally.

48. The method of claim 1, further comprising administering a corticosteroid in an amount sufficient to ameliorate any side-effects from administration of the hyaluronan-degrading enzyme.

49. The method of claim 48, wherein the corticosteroid is a glucocorticoid.

50. The method of claim 49, wherein the glucocorticoid is selected from among cortisones, dexamethasones, hydrocortisones, methylprednisolones, prednisolones and prednisones.

51. The method of claim 48, wherein the corticosteroid is administered prior to, concurrent with, intermittently with or subsequent to administration of hyaluronan-degrading enzyme.

52. The method of claim 1, further comprising effecting treatment by administering another agent or providing another treatment for reducing or ameliorating insulin resistance.

53. The method of claim 52, wherein the subject has a disease or condition associated with insulin resistance, and the method further comprises administering another agent or treatment for treating or ameliorating the disease or condition associated with insulin resistance.

54. The method of claim 53, wherein the disease or condition associated with insulin resistance is selected from among type 2 diabetes, cardiovascular disease or polycystic syndrome.

55. The method of claim 1, wherein the subject is a human.
